United States Patent Application Publication US 2026/0357256 A1 - sequence listing, part 10

SEQ ID NO: 9 - DNA, 58617616 bp, Homo sapiens (residues 19,539,208-21,710,230 of 58,617,616)
  source 1..58617616: mol_type = genomic DNA
cagcccttggggctagagctgggttctggcctctcagagcctcaattttccctcctgttaaaatggggatcatgggccaagcacggtggctcacgcctgtaatcccagcactttgggaggccgaggcgggcggactacctgaggtcaggagtttgagaccaacctggccaacatggtgaaaccccgtctctactaaaaatataaaaattagctaggcctggtggagcgtgcctgtaatcccagctactcaggaggctgaggtgtgagaatcacttgaacccaggaggcagaggctgcagtgagccgagatcgtgccactgcactccagcctgggtgacagagggagattccgtctcaaaaaaaaaaaaaaaaaggggggggatgatcgtggctgcaccttgcctaaaaggaggctcccagcggtccccatcagtagcagcgtgcttccttctccccactcctcacccacagacgccacccccaccgaggagccaatggcgactgcactgggcctggaaagacggtccgtgtacaccggccagccctcaccagccctggaggactgggaaggtgagttagcctgcctcggagtcccgtctctgctgcgggcttgttgggggtggggcttgggctactggggtcgtgtgaggagagggcacacactagacgaagggcccggcgccgtcctggtccccggacatgacagcccctggaggtgatgccccaagttcaagatctaagtgagaggccggtcagacagaggcaagagctcagcgcaccgggatggaccaggtcaggccctgggcggcagaactggggtcgcggggaacccagtctgccctgcacctgtttcaggccgctggctcgggtcgtgggcgcgctcggctagccggtgcccaccgggggagggggctgagacagcaagtaaggcctttgcacgcatgcatgggggcctacaggccgccgccctggtcccagcgcgtgcggtgcccgcagaggccagcgagtggacgtcctggttcaacgtggaccaccccggaggcgacggcgacttcgagagcctggctgccatccgcttctactacgggccagcgcgcgtgtgcccgcgaccgctggcgctggaagcgcgcaccacggactgggccctgccgtccgccgtcggcgagcgcgtgcacttgaaccccacgcgcggcttctggtgcctcaaccgcgagcaaccgcgtggccgccgctgctccaactaccacgtgcgcttccgctgcccactaggtgagggcggggctggatgacgggggcggggctttgaatgggcggggctggcgaacgccgggaagagtcgtggtgggtggggctgggaggggcaggaccgtgtgggtgtgggcgtggctgggaagagccgggggacccttaggcgtaggacgacgtcagggggcggggccaggcagggcggggcttttgaagagaggcgctgggaacagcgcggggcccaagtgcaccgtcaggaggcccagcgggtcaggacccatgtccggccccctggaacgcatctccctcccgctgccctcatttgagcatctgtaagagctcagttctgtggagtgtcttgagcccaaatgcgtgcaggatgcagggagaaaagcaggactgatccccgggaccttatgcgggggtggggaggtgggtcggtacctaaactatgtcttcgacaggcgcgcctaggggagcatgggtgggggcgatggcagatctgctctctggagtgtccgcccttggatgcacatatgtgagggggttggggaagaagggtcctttagtcccaggttacccggaggcgcagttcctggggagggcggccacctgatctccgtccctgccttccgcagaagcctcgtggggcgcgtggggcccgtggggtccctgctcggggagctgtgggccaggccgtcgcttgcgccgccgccactgcccaagccccgctggggatgcgtgtcccgggcgtcctctggaggcgcagaagtgcgtgcggcctcggtgtccaggtaggaggggcggggtctggaggctgggacctgtacagaggggaggaaggggaggttaggggctgagcctgggagagagggtggagttagaggcggtgcctggatgtagagaggcagtgcttctcctgagcgatgcctagaggggaggagctagttgggggcggggcctcgtggacggggctgtgaagggcggggcctggtgcgggggcggagcctggaggacccaaactctggagccaggtggagaccagcccttccttccctcctgggcccaaggagcactggtaactatgcacatctggacaggtggatgccagggggctcttgtgcaggcagacatgggcagataggagggggtgcttcccctgtgtgcattccagactgtacagatgtcttcgtggggaaacagaattcagttcatgcactcagggtgcacacgtgcatggcatttgcagcccccaccccggtcccccacgcccacacagacacccgctcacagcctggcagacatgatgcctaggccctcccagggccagacaccgggcaagccaggaggagactggaaattccgctagcgcctgggctccacaaacacggcctggaggctgctccggggagcccgtcacagggtgggggcacatggtggccaatggggcgttggggtccccaccccatcgcgcctggctctgctctcccggtgcctgtgccctgaagtttccagtggaattttccattttatggagaaaccgcaggattgggaaggggggcagttgttctcagcccaagatccagccccttactgggcccccagcccctgtccagacattttctcttctgctggaaagggcagtgccatattttgagacttacctctcctgtcccctcctataggacctcttccctacgtctctggatcccagttcctatgccctggcccagtcctgaccacttagcccatctccccttcacactagggactgctccaagcagggccatgctgaggcctctgagaggcaccttatgggggggccccaggcatatttgttgagtgactgattgaatggaaagccctcctcaggagggagtgtgaaggtttctctgtcctgcttcctctccatatccccccagggtgcagccttgacacctgtgaatgcccggaccacatcctcctgggctcggtggtcaccccatctgggcaaccactgctaggagccagggtctccctgcgagaccagcctggcactgtggccaccagcgatgctcacggaaccttccgggtgcctggtgtctgtgctgacagccgcgccaacatcagggcccagatggatggcttctctgcaggggaggcccaggcccaggccaacggatccatctctgtggtcaccatcatccttgataagttgggtaagcacccttgcaacatggggcatgaaggggctgaggatctggggaggaagttctagcactcgatcaagagaggaagaaatgagatgtgacacagtcattggcgaaggcacagagtgagtcggcatttctgggagaaaggagaggatggggacgttgctcctaggaagggtgggtgggagaagctctgatctttaccacctttgaccccagagaagccgtacctggtgaaacaccctgagtcccgagtgcgagaggctggccagaatgtgactttctgctgcaaagcctccgggacccccatgcccaagaaatactcctggtgagcgcccgccccgggctcaggggcatcttctgtggctttggggttagattcaatttcatgttgttatgtggtttcccatctggagagtggggaaagcgttaacggggaatgaattgggtgggagagggactaccaaggaggctgaatggggccagtcttgctggggaggaggctgactttggcaaagcctctctgcagctccccagcctgcagactgggggcaacacagcccctcccactgagtcctatggtgtcgctcacctgccatccaggttccacaatgggaccctgctggacaggcgagctcatgggtacggggcccacctggagctgcggggactgcgcccagaccaggctggcatctaccactgcaaggcatggaatgaggcgggtgccgtgcgctcgggcactgcccggctcactgtacttggtgagtgtccttggccacagccccgagcaagccttcacccaaacggaacccggactgtagctaagctcaaccccaaatggagcccccacttcagactgatccaatcctaggcctccactgagcccccataccactctgagcaccaaccttcagtccttaccctgggcagacccctgtcccttaggtggagtccttgactgcagacagagtccccagccttggcctccatgaagtcctcctccctgccctgacctgcatgttttctttgtccccagccccaggccagccagcctgcgacccccggccccgagagtacctgatcaagctccctgaggactgtggtcagccaggtagtggccctgcctacctggatgtgggcctctgtcccgacacccgctgccccagcctggcaggctccagcccccgctgcggggacgccagctcccgctgctgctctgtgcgccgtctggagagaagggagattcactgccctggctacgtcctcccagtgaaggtggtggcagagtgtggctgccagaagtgtctgccccctcgggggctggtccggggccgtgttgtggctgctgactccggggagccgctacgcttcgccaggattctgctgggccaggagcccatcggcttcaccgcctaccagggcgactttaccattgaggtgccgccctccacccagcggctggtggtgacttttgtggaccccagcggtgagttcatggacgctgtccgggtcttgccttttgatcctcgaggtgccggcgtgtaccacgaggtcaaggccatgcggaagaaagccccggtcattttacataccagccagagcaacacgatccccctgggcgagctggaagatgaggcgcccctgggcgagctggtcctgccttctggcgctttccgcagagccgacggcaaaccctactcggggcctgtggaggcccgggtgacgttcgtggacccccgagacctcacctcggcggcgtctgcccccagtgacctgcgcttcgtggacagcgacggcgagctggctccactgcgcacctacggcatgttctccgtggacctccgtgcgcccggctccgcggagcagctgcaggtggggccggtggccgtgcgggtggccgccagccagatccacatgccaggccacgtggaggccctcaagctgtggtcgctgaaccccgagaccggcttgtgggaggaggagagcggcttccggcgcgaggggtcctcgggcccccgggtgcgccgggaggagcgcgtcttcctggtgggcaacgtggagatccgggagcggcgcctgttcaatctggacgtgcctgagcgccgccgctgcttcgtgaaggtgcgcgcctacgccaacgacaagttcacccccagcgagcaggtggagggcgtggtggtcacgctggtcaatctggagcccgcccccggcttctccgccaacccccgtgcctggggccgctttgacagcgcggtcaccggccccaatggcgcctgcctccccgccttctgcgacgccgacaggccagacgcctacaccgccctggtcaccgccaccctgggcggcgaggagctggagccggccccttccttgccccgcccactcccggccaccgtgggcgtcacccagccctacctggacaggctggggtaccgtcggacggaccacgacgatcccgccttcaagcgtaacggcttccgcatcaacctcgccaagcccaggccaggtgaccccgccgaggccaatgggcctgtgtacccgtggcgcagcctgcgggaatgccagggggccccggtgactgccagccacttccgcttcgccagggtggaggcggacaagtacgagtacaacgtggtccccttccgagagggcacacctgcctcctggactggcgatctcctggcctggtggcccaacccgcaggagttccgggcctgcttcctcaaggtgaagatccagggtccccaggagtatatggtccgctcccacaacgcagggggcagccacccacgcacccgcggccagctctacggacttcgggatgcccggagtgtgcgagaccccgagcgtccgggcacctcggcagcctgcgtggagttcaagtgcagcgggatgctgttcgaccagcggcaggtggacaggacgctggtgaccattatgccccagggcagctgccggcgcgtggccgtcaacggactccttcgggattacctgacccggcaccccccaccggtgcccgcggaggacccagctgccttctccatgctggcccccctagaccctctgggccacaactatggcgtctacactgtcactgaccagagcccacgcttggccaaggagatcgccattggccgctgctttgatggttcctctgacggcttctccagagagatgaaggctgatgccggcacagccgtcaccttccagtgccgggagccaccggccggacgacccagcctcttccagaggctgctggagtccccggcgacagcacttggtgacatccgcagggagatgagcgaggcggcgcaggcacaggcccgggcctcaggtcccctccgcacccgccggggtagggtccggcagtgacctgggcaggggcctcgctttcccacctccctccagactcctttgaccccaggaagttttgcccctccttcttctccagacagccccctccccaggtgtctgggtcccctttcccgcccctttccagaactcagagtcagacaagaacccagagcatccgatggtagaaacaccaggaagacaattgttgctgtgtggtatggaatggagtttgcggtgactctggggccagcacccaggggacgacgttcaaccctagcctgaagggacccgctcccagctcagaagccgtctctgacttctcgtgcgtattttgaccctgatttcaatcttctacccttgggagttctggcgtttggcacaaagtcccctctgcctgtttggagctcagtgctagaccaggtcccctgccccgagctttgtttttggggttatttattgaaacaaagtgtggggagctggttgtgggtgtgagtgggggtgtggggtccaggctgggcccagtgaaaaggaggaaggggttcccatgcgggggaggctctggggctgaggggaacaattctcacgtgtttggtgcttagagacctgcccggggcgttgggcaggccctccgggggctgaattaaaaatgctttatttccaactcatggtgtcaggctctagggaggaaggatggaggctggggctgcccggcccagatacacctttcaggcagaaacacgcggaggcacacgcgggtgccgggggcaagaagcacgggcggctgtgaccgctgaacacagtggcagcctgctgctctggcctggactccttggctgtgcctggccgtatgccccggggctacagcaggcagggaggggccctggcaggggagcctctggggcaggcaacagcaagccaggccaccctggacctcctcagtcgagtccacagcagccccaccctgggccccacccacctgaaccccggccacacctcggtcatgtggcgacggggctgcccgaggccagggctttctgaccttgccaggaccctgggtctggaggcggcagaatcacggctggctggcagtctgtgtgcacgtgtgtcctcctggcgctccacagggccggcgctgtcctgaccacacccccactgtccagacagaaaaactgaagtcctggggtctggcatgaatcccagcaggtttgagccccctatagctctaggtgtgtgattccccagggtctggggatgaaggcatcaatgtggcaagactggagtggcctccagggcacctgggatgggagacttgtccctggctgacaccccctagggagtgggggtatggagcgtcccttagcttagggggcaaccacccacttcctcttcaatctcccacccattcactggctcccctctccagacccccgatctcatcattcacccatccagcatttagaggtgtgagctctgcactagcaacttcaggggacctgagagagcctatctctctagggggagacaggctcacacgtgcataccccaatatgccctgggccagtgctccacccagagggtccctggctcttgtccactggccacatccccccttcggctgaggtcttggcaaatccgaacctccgcagctctcaccctttcagtcagggaaacacttcctttgccctagggtggacttgggggcctggaggcatgggagaagcccaagatgcgaggcgtcacccctggtctctgaaggtgggccctaagggctctgctggagtttgggtttgggcagccccagacattggcaccccagcctcaccctcgataggctgtgacaggcaagagaggcgagaggtccctgagggagctggcagggcttgggagaacacacatttatccagaacttactgtctctatacccccagctgataggctcagaggcacaggcccctcccaaggcaacctaggttcccggcctgcctgccacagaaccctgctcagggctgcctggtgggggtcctggggaggggtgggaatgggggcgctcccacttgaagcgggcaaagctggctgcagctttccaggcggagggtgatgaggtgtcaggctccacggccaaatacctttcattgagaaagtgttggggcctccgacgctgccaggctagggcggccagccaggcatggagcgggcagctggcccagccctgtccccttccctagggtggggcaggggtggacgggcatcctccagaagccccctccccagtcaccacgcctgggccaggaagggcatctcaggaggaggacatggctgaagcaaaagctgggcagggcacggggctagagtccagctcctccccatccctgctgataactctgcaagagggcagcgtttggccacaatttccagatgaggaaactgaggctccaagagaaggacgccatcaacctgagtcaacagccttgtgcctcttgacactgcctgtctcccccaactgcagccctcaagccaggaatcccaccccctccctcctggaacctgggctaccgtccgcctcctggtaaatccattgtctaccccccaaccaaattggggctgccagaccacaccccctcagtctgggaggagtgaggggcaggggaccccctcgaagagacccccagctgcagccaccctgggtcagctcagggcacaaacaggcccttggtcccgcccacggcattttagacttttataattttagaaccaggggttcttaaaattcctagcaccatgatggggaaaaaatcttggaacagtaaaatgtttaaaacaagagtcttcaaaccacagaatccaagaggagggagataaaaatgaacacacattgagcgttgactgactgtaagccctccgagccagcccccgcaaagcctaactcactttaagggcatttagtataaatctgttgccttgggatccccaaaatatgcttttagggaggatgatttttacccccattccacagctggaggaatcttctcagggtcacacagcaaatggggtactgtgggctggggaagggcaatgtttcctggagaaggggacataagcactgggtcttgaaggatgtgtaggagtttgctgggtggccaaggcaggaagggcataccagggagctggaaaggtgaacgtgaaagctggaggagggagacccacggagggcggcagtagaagggagacacaaagtggaggtgagcaggggctcgaatgctgagtgaggagcctgagttctctggtgagcaatagggagctatgggttgtgctgaagcaggagaaggttacacaatatctcgtgacaaagactcccctggagctggtgcaggactcagcttcttacaacatgcttctttcacggaactggggtctgctccctcctacttgggggcccttccagggtccaaaccctgcagcccagcgccctctccccgccagctgcctcctgtcctggctgaacatccctggctcctccattggggcctcgtggacctggcgtggccacccaccacttccctagccccgtctgtctctctcatcagccctcagagttgggtctgacccagcctcagaccccaaagactggagccagcctggcggggagacctggctttggtcaggtgggggaagtgcttgtgctttaatggtggaaacaaaggcaggatgccacagggtgagagcagaccaggagaatgccatgtcccgatgcctcagccctcccagggcaggagctaagtctagacccctgggccgagggtggagggggtctgggcaggcaggagggaggagaccccggccatcggggaatcagcagaccctgaggtttggaggtggatgcagggaaacaaacactaccctaggcagggcgagtgtgtcacacagagccagacacgcctgtcatcgatctcgaggtcacgctgccctcgtcacgccccatccctgtcccctgtagtcaggggcatgactccctccttcccatacttcctagccaacttctcgtcacctgattggtgacactgtcaccctcaggacagccacataggcagttgcactcgaaaagagcatgagcccagacacaccagacccatgggacacgctggacactgtcccccctcatcacagcagcacgggtagacagatgcaccctcaacacagagaaaggcccacgcttagggtcaggtagcggtgcctgcagctgcgtgcacctgtgcatacctgtgcacacctgtgcgcacctgtgcccagctcccctttgactcacccatcatcaccccacacatcgggacacacttgacccccagactcccagctggccagtctcaaccccccacgaccctccacaactcagccccaccaggcacatgaagccatgccgagcacaggcagcacctcccactctctcggggccctggggagcgggtcggccctggggctggggactggcgggaggcctcaaggtcccagccacttttccagggaagtcctgaatcccttcctgctgactcagccctgggggctggctaggctgggggctgccaaacctcaggtatgtccttgaaggctgcctggcggggcctctgaggtgggggcgggggctcccactcgggactcagtccttccctgggccccagcctccctccttgccccagatggagctgcagctttaaccgtggcgttcagggcatggggccagcacgatggagcctgaggccggctgctcccaccccagttcctcccggctgagggttggtggaagaataagctcccagcccagccagagtatcccagcctgactgtggcctcataaagacagcactgtctggtgggaggtggcctggctgcccatcctggggcccagcacagggacccatgcacacacagtgggcacacacgtacccatgtgatggctacatgcagacctgtggatacagatgtgcatcatcagacacaaactcagcaccaggactggcccccacagaaccccagtcaggagggggaggcagcactggccacagatactccagtctgcagggccaaggttggccagcccaaaggccaggggctgggaaaacccagaggagggcccagggaaggctttctggaagagagggcattttgacttgggctttgaagggtgagtaggagtttaccaaaccaagctcagatgtccaaaagtcttaatgctggttttgaggtttaccttttgtctgtgaggatgttgggcaggggagggagacagacaaaccccaattcactacctccttttgaggacccagcctctgccctcagggagcttccagtcagataggggaggcagcactgactcagccaggagggatagaagatacttcagctgtgtgaagcacctgtcgtgtgttgggttggatcctgtcaaaaacccatagggaaaattctattatgatccccattttacagctgagaaaactgaggctgagagcgggacataccttgctcagggcccacagggaagcagagctgttcacacacagccctggttgctgacgtgcaattgtggctgctgacctggtcccaaaccaactcaaaagtttgcgggccagaatggtgcagctcaaagaagtctgcgttggcaaaagttgcatctttgcacctggaatcctggccaggccgggaggcccctcctcccgggacatacaagatccccctgggacttctcagcgagatcatcccctgtcctttgttatctggctgctgagtggctttcacggggcaggggcttctaggcagagggatgttggagtgagggcctgggggtgcttcgccaggacttctgggaggcctgggtccccagcctcggccccgcttgccatctggcccagctgaacacaaacacttggacatggccgacccaacggaatctgggttgtggtcaggccgtggctgaaaaagccactggaaaaacacgcagcccacggggccaggcccagcttacgtttcaccagggaggagtggcctgctcggcgcccagagccgaggaatgtccgttctctaaccctttggaacttgttgtctgactggggaatccagcagctgggcggtgccatccttagtgccctctggtcaggctgtgacttacctcctgctgtgttcttggagactcaggcctcttggcgtggccccctggcccagcccctggccagccactgctgaagaccccttgtcagcttgcacacccctgaagacagagggctcactcccttccagctgtcatgccaggcagccggaagcctgttaactaggctgattttttttttttgagacagattcttgctttgtcgcccaggctggagtgcagtggcacgatctcggctcactgcaagctccgaactaggctgattttttatgggaaattcgggcttccttggccacacagatgggaggtcagtgcagcctgggcactccctcctttccctggggttccacctccttctggatctccggatgtcccctcaggcccctaggatcagcaggtcccagtggaccccagtatctcactgcgaaacgtgttcctcaccctgcagccatgtctcagggttatccatctgtctgtctgccctgcgccgcgggcagggctggtggcccacacatccactgagtgcccactggatgcggaagcacctcacttgcatctcctcactgacctctcccggggaggctggtcccattagtgctccactttgcgggggagggccgggggggcggtgtggggaaacagaagctcagggggtttcttttacgtcctgaagatgtggtggcagattctggaagtaggagccagttccccactggctccaggacaagggcctgggaaacctcgtttgtcaggccgggacaacgcctggtggccaaagggggagctgcagcctgggccatgggggtgcctgctgcagtgtccctagcttaaggctggcttgggttacttctctgctcaaacaccctccatggctcccgtagtctcctcagcgggcacaggggtgctagatgagcccctcctgggtcattacagagactcctgactgcaaaatcttgcctcttgggtcagacctaagccctgtcctcactcaacctcacagcctgtttccccagctggggaataaaccaacaatggcctttgcctcttcaggaactggtgactgcaaggctggcatgggttaggcgctctgtaattgcaattgtcaccctcagtaacgcacaggagaggggcagggacttgagctggggtgtcccaggcagcctcaaccaccctccctcagcaatcgctacccgcccccccgcccaggacaaggcatctgaatcagggcctcaatttcctccccagagtgtgggggcctccaaactttatcgagggtcctagtgtgttaggtcttgaaatgccccctggagtcgtaggggaacagaaatgttcactagggagtgggtatagggccttgccaagcactgatgaaggggccctagaaacttccatctttttttttttgagacagagtctggctctgtcacccaggctggagtgcagtggtgcaatctcggctcactgcaacctccacctcccgggttcaagttattctcctgcctcagcctctcgagtagctgggattacaggtgggcaccaccatgcccagctattttttgtattttagtagggcttcaccatgatgccaggctggtcacgaactcccgacctcaattgatctgcccgccttggcctcccaaactgctaggattacagatgtgagccaccacaccctgccaaaactttcatcttaaaactatgagggagaccttgaaactctatgtgggggaaattgaaactgcatatgggggtcttgaaggtgccactgcacaccttgcttggcctgagcaaacctgcaggttacttccacccgtgacccacgtggggagactgacgccagagacctcctccccacacaccacgcctctcctcatccctcaacactctccgggacccgcttccgtccaaaaaacccccatgggccaggcaggcgtaaggttgcggcccagggaggggcagcccgttccctagggccacacggcccagccccttaccccgttacttggggcaggggtcgattccgagccaagggttggggcgactgacctagagtgactggagctaggcccgcggctgcctgagttgccccatctctatcccaggagagggaaccagtgccaggaggaagaccaggcgcccgcccctgcggacgctcctagccccttagctaaggtctcaggacaccggctggcggtgaggacggggcagctcaggggaaaagaaagccagggagggccgggggctccgaggggttttagggaggggtacagcagttagccaggcggagggaatgccagtgcaaaggccctccctgcggtgggaatgagcttactcaggggcagtgaggggtcagcgaagagggagatgcccggatcctcttctattgtaagatcgccccctggcggcccagtagagaaggggcagggagatggggccggtccaacctcccgtctaccctccagctctcccagcctggcagatgagtggcccccttctcccagcctgggtgtccccaaaggcaagaaggaaaaacagaatcccagaccttgcgagagcacccctgcatggacacagccgtcagcacctttctgtgctcatgggattgccaccaagcccttcgagcaggagcacatgtgcccattttatagaggggcaaatgggctcagggagagaggggagcaagcagggtgcagaggcaggactcaaacccaagactccggccctgtctggggctctggcaggttgggctggaccaggttgagggtgtctgttgggagctggaggagccactatgggcctgtgagggtcccaggtaggtggtcaaggtgggaggctggggaatccagaacgcgggcgcaggggacagtacacatcaccagggttccctctctgtgccttggtttccctagcacttcgttgaggaaggtgagaacatcactggctccctcctcaaatggtcccccactcgttttgggatctgctggggattcttgcttcaatccatgtgcccacgggccactgggagtccctacaacgctgccagtggccccatttaacatgcaggtcccaggtcaggcatggtggctcacacctgtaatcctagcgctttgagaggccaaggcgggcttatcacctgaggtcaggagttcaagaccagcctggccaacatggcaaaaccccatctctacaaaaatacaaaagttagccaggcatgagggcgggcgccttaatcccagctacttgggaggctgaggtaggagaatcgcttgaacccgggaggcagaggttgcagtgagctgagatcgcgccactgcactctagcctgggtgacaaagcaagactccgtctcaaaaaattaaataaaatgcaggtccccagttccctcagcggaggctcctacagatttggatgtgtctagagattgaaagcattatccctcactttccaaattcttgctgtttcaaaatgaggaaggctgagagctgaaagcccaccatcccgtcccagctggacccacaatatgggtgatgtgtggtccaagggcgggcagaggcggttaccccagtcaggatcacacactccaggtatttagctaccatttgcaaaacactcttgctagaggtagtggtgtgtgtctatagttccagatactcaggaggctgagacaggaggatcacttgagccctggagttcgaggctgcagtgagctatgtcactgtactccagcctgggtgacagagcaagaccctatgtctaaataaataagtaggccagcatggtggctcagtcctgtaatcctaccactttgggaggccgaggcaggcggatcacttgaggtcaggagttcaagaccagcctggccaacatgacaaaactccatctctactaaaaatacaataattagctgggcctggtggtgggtgcctgtagtcccagctactcgggaagctgaggcaagagaactggttgaacctgggaggtggaggttgcagtgagctgagattcacgccactgcactccagcccgggtgacagagcgagactctgtcccccctcccctcaaaaaaaaattatttatttaataataaaaataaataggctgggtgcggtggctcatgcctgtaattccagcactttgggaggctgaggcgggaaggtcacctgaggtcaggagttcgagaccagcctggccaacatggtgaaaccctgtctgtactaaaaatacaaaaattagccaggcatggtggtacatgcctgtaatcccagctactcgggaggttgaagcaggagaatcacttgaacctgggaggcagaggttgcagtgagctgagatcgcaccactgtacttcagcctcggcaacagaacaagattctgtctcaaaataaattaattaaaataaaataaaataaaataaaatataaaataaaataaaaagaaacacaaaaattagccaggagtggtggcacatggttatagtcccagctactcaggaggctgaggtggaaggatcgcttgagccgaggaggtcaaggctgcagtgagccatgattgcaccaatgcactccagcccaggtgacagagtgagaccctgtctcaaaaaaaaaaaaaaaaaaaaaaaaaaaaaaaaaaaaaaaagctgggtgtggtggctcatgcctgtaatcccagcactttgggaggctgaggcaggtggatcacttaaggtcaggagttcaagaccagcctggccaacatggtaaaaccttgtctctacaaaaatacaaaaatcagccggacatggtggcaggtgtctgtaatcccagctactcgagaggctggagcgggagaattgcttgaacctgggaggcagaggttgcagtgagccaagatcacgccattgcactccagcctgggcaccagagtaagactctgtccccattcccctcaaaaaaaaaaaaaaaaaaaaaatcaggaggggaattgatgagactaaagggtacatgcattcttattttttatagagatgggttatcactctgtctcccaggctggagttcagtgacatgatcacggctcactgcagccttgaactcctgggctcaagtgatcctcccgcctcagcctcctgagtagctatggtgtccatcacatctggctaattttaaaaaatgtttatgagacagcggtgtcactatgttgtccaggctggtcttgaactcctggcatcaagcgattttcccaccttggcctcccaaagtgctgggattacaggcctgaaccaccatgcccagcctcaacgtgtccacttttaatatgaatagattctagaaaattgccctcctgggcggctgtaccagactgtacccaccaccactgccttcaggctgggagccccccgccctgctgcttcctcctatctaggggctcggggtgcaggtcacaaagcctctgagcctcattgtccccacctgttatgtggagacgcctatcagcacccacacagctagcaggcagttcaagtccctggtgactcctgtgtccctgtaatcacctttatggcttggttactatcatgcagccaacttttaggcacatttgaatagtgcaatataaaatattaataaagtgtgactttgtgtgcagaatttgacctgggttgggggggtggggcgggtgcagcagctcacacctgtaatctcagcaatttaggaagccgaggcgggcggatcacttgagcccaggaggttgagaccagcctggccaacatggcaaagtcctgtctctaataaaaatacaaaaattagctgggcatggtggcgcatgcctgtagtcccagctacttgggaggttgaggcaggagaatggcttgaacccaggaggcagaggttgcagtgagccaggatcatgcccctgcactccagcctgggcaacagagggagactctgtgacacacacacacacacacacacacacacgcgcacaacgaatttgaccggggtggggatttcttttatcgaaaccccccaagaggcctagctctgaatctctgaaccgtgatctgcattcacgctacaggcagaggagggcgggcgggagctggaggcgtagctgcccacaggctcagctccagcctctggcaggcacatccagtcaccgctttgtcctcagcacccagaggagctgcccggcaggtcctgccctctccctccctcaaggacctgcccagcagctctcccgggctcacagccttagtttccctcccacaccgcatgtcccccagtgacctctttgctctgaatccccccaagggctgacgaggctagagcctccgattttctagtagttgtggccccatcactccactgaagctgtcacacccgatgctggacttggaggtggcttcttgatcctggtggagcttcacttctgctcctggtgtctgtccttctttctgcttctatgacatcctctcctagtttctgtcccatattttggcctccgttgacttccaaattgctctctgcagagcaggcctctcccatgagtgcgactcccatgtgcagctgggggacggacaccctgggcctgacagcgtggagctgaaccggtctccccctcaaaaccatccccgtctattccaccggagacttcgggcaccgtgactcctcttcatcagcaagtactgtggcgccaccttcgcctccatcacgaactcagcgacacttgaccatccaccacctaggtcccaggaccctcctatgcccctcactgctgtctgtcctggatgcagcattggagtggctgtgaagatgctgagtctaatgggcacccccgagggctggcacctcctgcccctcctctgtgtgtgtggacacctcgaggtagggtcagtgctctccgtacgctcatgctcacctcctgtaggccttgtctcagaaggcaccttccccagttgggatgggactgagccacaaagcagaaggcgcactggcccgtgctccaacgtggatgaacctcaaagacacgatgctgagtgaaggaagccagacatgaaggccacacagtgcacaagcccactgatctgaaatttccagaccaggcacatctgagacaggaagcagactggtggccgccagaggctggggaaagggaatgaggagtgactgctcatggggacaaggctttttttgggagatgagaaagttttggaaatagaagtgatgatgttgtgaatatattcacttcattgagttgtgcactcaaaaatggcatacttggcagggcacaaggctgaagtggggagatcacttgagatcaagagttcaagaccagcctggccaacatggcaaaacctcatctctactaaaaatacaaaaattagccaggcgtggtgcatgcctataatcccaactattcaggaagctgaggcacaagaattgcttgaacccaggaagtggaggctgcactgagccgagatcgtgccactgcactccagcctgggcgacagagcgagacggagtgcagtggcacgatctcaactcactgcaagctctgccttctgggttcacgcgattctcctgcctcagcctccccagtagctgggactacaggcgcccaccaccatgcccgtctaattttttctatttttcagtagagacggggtttcaccgtgttagccaggatggtctcgatctcctgacctcgtgatctgcctcagccgtccaaagtgctgggattacacttcgtgtgtgagccactgcgcccggccaaaaaaatgttttttaaaggggaaggggaagctttatgttatgtatattttaccacaatttaaaagagaaaagataaaaaaggccttctcttggaaactggccctgaacccaccccccaacttttgcgtgtgtttctgataacttctgtctggaatgtagctcacaagagcagggacatgccctctgtctgtgagtcttgggctgcagggggccatgaggcaggcagactggatgtgacaacaggaacttagggtggggatgggagttgccttcatttcctggctgcaaatggtagaaagcgcagccacaccaccgtagggagggaatcccatgccagggctgactaggttatgagcagggggtgggcagaggtaccacgactccaggcttctagtccctggatgctcttcccacctagtcatgccttgggccccgcaacacccgaggctgcacagagcccagggccctggttcttggtgccgtccagcacccaaacatgaattgggggatgccaagctctaagccgtgcacagcagtgggccaacaggacctcacgcacagtatgcaggaaaagtgctttggaagtttatcgtctttaatgacatttcaactgaaaacagaaaccagctgggcgcagtggctcacacctataatcccagcactttgggaggccagggcaggtggttcacctgaggtcaggagttcgagactagcctggccaacatggtgaaaccccgtctctactaatacaaaaaaattaactgggcatggtggcgcacgcctgtaatctcagctactcaggaggctgaggcaggagaatcgcttgaacctgggaggtggaggttgcaatgagccgagatggcgctattgcactccagcctgcgcgacaagagcaaaactctgtctcaaaaacaaaacaaaacaaaacaaaacaaaaaaacagcaaaagagcaaatagagcaaaacccgaaaaaagtgcaaaactaattcccagtaaaattgagctccgaacataaaataaatatatataattgagacagggtctcactctgtcacccaggctggagtgcagtggcgtgatctcagctcactgcagccttaacatcccgagctcaggtgattctccctcctcagcctgttgagtagctgggactacaggcatgcgccaccatgctcagctaattaaaaaaattttggggtggggggcggtcgggcacggtggctcaagcctataatcccagcactttgggaggctgaggcgggcagatcacttgagctcaggagttcaagaccagcctggctaacattgtgaaaccccatctctaccaaaaatacaaaaaattagctgggcatagcggcaggcacctgtaatcccagctacttgggaggctaaggcggaagaatcgcttgaacctgggaggcagaggttgtggtgagccgagatcacaccactgcactccagcatgggtgacagagcgagaatctgtcccccaaaaaaaaaaaaaatctgaaagcagaatttttttgtagagacgaggtctcactatgttgcccagacgggtctcaaactcctaggctcaagcaatcctcctacctcgacctctcaatgtgctgggattacaggcatgagccactgctcccagccaggacattttaaaatcagaacagaatgatacggtcccacagaagacagtgttgggagtctgtgcctgagcggcgcaggtgagtggcaaaatcacagcacacatgacactgcagctgtgaccggtgtcaactaccacccaaaacaaatctggcaaacagacatcggaattaaaataagtcaaaaattttaatgggaaaatctgtgcccagtcctagaacagacaattcaattcatagcgttaccataaaattactgtcaaaaaaacgaactgaagtgggagaatgagtggcgtttcaggccatctcgagtcgcagcagacacatgagccggcgccacgggcctggctgaggagcaggggctcatgggcaccaccacccatctgggttttctgaggtcgtcggcggcacgttcagtaacaaagcaacggctggcgatacatggcagctcacgcagcgctctttcctgcttatcccccaaacttaattagatgtactggagttgatgctgccagggtctccagcaggtgaggcagttgcaggttggggggtggccccctgccagctaccctgggcctgaaacgacagagactgagcatcagagtgggtggccgtgagactggtgactacccagcccacgtgctgcaggcggagcctccaggggtccctgggaaggcttggaaaagatccacagatgacctccagctcagtggaggagggaagggatggaggggtcggtcctgggtcacagctggccttgccacctgacatgggacatggacgagcttccccggcaggaaaactggcctctagtggcttccctggggcttaggcaaaggactgactggcatcgggtacaacaagggctcctgcccggcgaggggcagggaggcaaggtcaggcctggagcccatgatgacgcccggagcgtcatggtgagactcggtgggaaaaaggggctctgaaacctggcccaacactggcctggctgggcagcaaggagggtgggaggcaaccacttgtcataaggggtgggggctctgtctgcagtgcagagacggcatcacgtccaacggcgctaagacgtttgtccacaggacccacccccactatggtgggcacggtacaggttaaggaagtggctgggactgctctgcccgtgagtgtgggagcagctcagacgggtgcaccacctgggggcactctgctctgaactggggtggacacacagctgctggcgcgtagtcaggtcccaggggtgcaaagggcaaggtgaggcccctcacgtgtgtccctggctgggggctgcatggtgatggggggcagctgccacagcaggacagtgtgggacgtgtgcttcccaggaccaggtgggaccccacagacagcacaggaggcatccgttctctgaacccctgggagagagtggtgagttgggaggggcacccggctctgcagtgccctggcacacaccacacacacagcctcgtgcctgtgctgggcacatgacacctgggcctcctcagtgtcttcaagacggtccccactcgctgccttcccagccaagctgcggcactgaggtctgagcccgagggaaggccccatctctcctccggcctcctctgctggctgcctgcccctccctctcgagggaaggacaccatgtcctcccacagtcctctaggaggtgcccttcccctccacagccaaagccctcatcttggggttcatccccactgactgttcccagcggctgccgtggtgacaagtggaggtgggggagggcacagtcattacagagtggggccctgcagagctgtgccccagaggtggccgcgcagcatggcctgtgtggctgctgggacctctggggaagctgccccaaggccgaggggtggctgacaagacgaccctttctgagaacctaccacccacctgggcgctgtgggacagtgcctgagactcacctgggactgcaggcagcctcccccaggaggaggctggagagaggccagagtccgcagggtgaggaaggcgtccccagcgctgggcagcgggaagggtccagaggagcctggaagagatgggagccggggtgggcagagtcgtggcgcctcctcaggtggaacccacccagcccctcagccggcaggaggcctcgaatgtggctcctgcccctcctcagcatccggcctctgctcctcagcccccacccaggcaggccagcgggccctccccaccacactactcatgtcccctcatggcttgtcttttttttttctttttaagacagtctcgctctgtcacccaggcttgagtgcagtggcacgatcttggctcactgcaagctctgcctcccaggttcacaccattctcctgcctcagcctcccaagtagctgggactacaggcgcccaccaccacgcccagataatttgttttttctttctttttttttattattattatactttaagttttagggtacatgtgcacaatgtgcaggtttgttacgtatgtatacatgtgccatgctggtgtgctgcacccactaactcgtcatctagcattaggtatatctcccaatgctatccctcccccctccccccaccccacaacagtccccagagtgtgatattccccttcctgtgtccatgtgttctcattgttcaattcccacctatgagtgagaatatgcggtgtttggttttttgttcttgcgatagtttactgagaatgatgatttccagtttcatccatgtccctacaaaggacatgaactcatcattttttatggctgcatagtattccatggtgtatatgtgccacattttcttaatccagtctatcattgttggacatttgggttggttccaagtctttgctattgtgaattgtatttttagtggagatggggtttcactgtgttagccaggatggtctctatctcctgacctcgtgatccgcccgcctcggcctgggattacaggtgtgaggcactgcacccagcccatgccgggctaattttttttgtattttcagtagagacagggtttcaccatgttggccaggctggtctcaaactcctgacctcaggtgatccactcatcttggcctcccaaaatgctgggattacaggtgtgagccaccgcacccagacctttcatgtcttttcttattagtatcgccattctgtccccaaagcacaggtatctgttggttgggatcatggccaagaggaacagaactctcacagttgaaacagaagaaagagttacacagagttgaccactgggggaagggagatgtggtcccactgtggcctccccagatgcagctcagtggccgtccacatgggtacagatgactgtccctgggccagcctcactcaccggagctaggtgttgacaggcagctggcgtggttccctgggaccccaacttccgtggtatccacagccgttttacccgtgtaaatggtagcctcttcttgaaacttccccatgttctttttataccggattcttttgttgccaaaccagttagagacctgcggacacacaggagtcactggaggagctgacccagcgacttctgagacacgacgcagtctgtgggttccctggggtgcccgttgctcccactgccttagaagacaacactgcaccctggggctatgaagagtctgggactgagaaggtggcgccctctgaaccacggacccagggagatgtccacatgggttgaggacaccctggagctggcgtgtcttagaactctgctgcctaaaactggatgttgctggaacctgaacctgggaaggggctggaaggaaaacaagactgtctgaggtgggccgggagggacagcgcctctggctgccatgcagcaggcggcaggttacgttccgtgttctcttcaggaaaagtgagagccagggagacctggggacccagtaactgcgatcgaatcccaaacttatcaaatgaaaacaaggtgaactctgaaggggtagttggaatgtaccaggtgctaggataagcacttctcatatattcatatatttttcttaattttaattaaaaaaaggttttttggccgggcgtggtggctcacgcctgtaatctcagcactttgggaggctgaggtggggggatcatctgaggtcaggagttcgagaccagcctggacaacatggagaaaccccatctctactaataatacaaatattagctggacacagtggcacatgcctgtaatcccagctactcgggaggctgaggcaggagaatcacttgaacctgggaggcagaggttgcagtgagccaagatcgcactgcaatttagcctgggcaacagagtgagaccctgtctcagaaaaaaaaatatattttttctttttttttagagatagggtctcgctctgttgcccaggctggtctcaaacccctgggcttgagagttcctcccgccctggcctcccaaaatgctgggattccaggcccagcctcatatatcattctgcctcatcctcatgaggacctgggaggcagctgttatcgtccctgctgtaagaaagcagaggcaggagaaaaaggagctagtccatggccaaggtggaatcagcccagctctgactgcaaactggcactggagtcccccagggaggggcttgtcacctttggtggcactgctgatgcttgggctccatctgctctgtgggggctgtcctgtacactgcagggtgctgagcggtatccttggcacccactgggtgccaggagcacttcccttctctagtcgtgacaacaaaaatgtcccctgggcagattcacatgggtgagcaccccagggccagcgccttcctacaggcatggagacgtccatccagggccacatttcagtatcccaaagcaagtaaaataaacgtatagtataataacacacagaaatgaaacagctgagggatggaagaggattgtggatgacctttgctacttcaaacatttttttctcactctgtcacccaggctggagtgcagcggtgcgatctcagctcactgcaacctctgcctcccagattcaagtgattctcttgcctcagcctcaccagtagctgggactacaggcacgtgctaccaagcctggctaatttttgtactttttttttttttttttttcggagacggagtctcactctgtcacccaggctggagtgtggagtgcagtggtgcgacctcaactcactgcaacctccgcctccctggttcaaatgattctcctgcctcagcctccccagtagcgggattgcaggcatgtgccaccaagcctggctaatttttgtatttccagtagccacggggtttcaccatgttggccaggctggtctcgaactcctgacctcaggtgattcgtccgccttggcctccaaagtgctgggatttcaggcatgagccaccatgcctggccaacatttggtgtacttacattatccttgcaatgttaagtataaaaagaaggatccctgtctgtgtgctctctgttccaaacatagtgtctgcctaccccgggggtgtgagcagccttctcttgatccacatgggaggccccagaggctccatcctggttgaagcagccctggttgtcctccagacaattgttccttgggggccaaatgtctcacgcttctccaggggccttgaagacccagaggcgcagccccttgctccagctctggccttgtttctgacaccacagcagatcccgatgagcaaagtcatatgtgactatgacctcaggatgttttgctgcctgcgtgaccccgaggggttccaattgctctctgtcacagagacttgactggacttagcctgggttggagcagagcatggtggtgaaggactagaaactcagcccctccaactgcaaagtagggagggctgtggtgacatgcagcaagccatgctgtgggtcagcacctgccattcctgctgccatagaggctgtggggctgtgcctgcccaggtgggagggcggcacccaggccctgttccacacactcatgctgccacgggggtatggcctggacctggcttgctgccataggctgcctggacttactgtttccatgttaaaaccttcggaaatatttcttagcctcttggtcttagtgtctccctctttcacccccagttccacagaggacactggtggctgcctaccaggctatagagtcagggagctcacactctctaccacgtcacctcagggggctcacactccacagcatcccccagggaactcacactccatctcaatcacctcagggagctcacactccatctgtatccctcagggagctcacaccccacctgtatccctcaggcagctcacactccatctgtatctctcagggagctcacactccatctctgtccctcagggagctcacactccacctcaatcacctcagggaactcacactccatctttatccctcagggagctcacattccatcagtatccctcagggagctcacactctatctgtaaccctcagggagctcacactccatctgtatccctcagggagctcacactccatctgtaaccctcagggagctcacactccatctgtatccctcagggagctcacactctaccagtatccctcagggagctcacactccatctgtatccctcagggagctcacactccatctgtaaccctcagggagctcacactccatctgtatccctcagggagctcacactctatcagtatccctcagggagctcacactccatctgtatccctcagggagctcacactctatcagtatccctcagggagctcacactccatctgtatccctcagggagctcacactccatctgtatccctcagggagctcacactccacctcagtcacctcagggaactcacactccatctgtatccctcaaggagctcacactccatctgtatccctcagggaactcacactccatctgtatccctcaaggagctcacactccatctgtatccctcagggaactcacactccatctgtatccctcaaggagctcacactccatctgtatccctcaggaagctcacactccgtctgtatccctcagggagctcatactctgtctgtaaccctcagggagctcacactctgtctgtatccctcagggagctcacactccatctgtatccctcagggagctcatactctgtctgtatccctcagggagttcacactctgtctgtaaccctcagggagctcacactccgtctgtgtccctcagggagctcacactccacagcatcacctctgggacctcgcattccatctgcatcgctcaggaagtcctcaggtctctctgtgggtacacttgcacccctgcctcacagatgaacggggagagcgctggagtcccacatttgtaatgcagagcctggatctgagctggcctggctgactcagagcctggagacttggctcctgttccacactttttttgtttttcagagataggatctcactctgtcacccaggctggaatgcagtggcgccatcatagctcactgcagcctcaccctcctgggctcaagtgatccttccacctcagcatccgaaggagctgagaccacaggtgcacaccaccaagcccagctaattttttaaattttttgtagagacagtgtctcactatgttgcccaggctggtctcgaactcctggcctcaagcgaccctcctacctcatcctcccaaagtgctgggattccagcagccatgcctggcctctgcacacatttaacaaacttccctgggtgtcctcatgggacctagtcatccactcctcccaggcgtggcgagacgtggcaggagagaacgtcacctgggagatggtgaggccgcccttcctggccagctcttctttggcttcttcgctggggtaagggttgttcagatgggagtaaaaatactcattcagcacttccgtcgcctgcttgctgaaattccgccgcttgcgcctgcaaaaacagccgccttcgtaggcattaatatgctgggactccagtaccacccccacctctagttctgagtatgattttccagtagttctgaaaacagcaatcacttgaggtcaggagttcgagaccagcgtggtcaacatagtgaaaccccgtttctactaaaaacacaaaaattagctgggcatggtggcgggagcctgtaatcccagctactcgggaggctgaagcagtagaatcgcttgaacctgggaggcggaggttgtggtgagtggagatcgcaccactgcactccagcctgggcaccagagtgagactccgtctcaaataaataaataaataaatacaaaataaaataaaaatgaaaacagcaatacttcaggccttcttcccaagaggctgtgaggcctccaaccgtgactgcagacacagcctccagggctgtcttcaacccaagccagcactatttccctccagtccctcagagccggcccttgaggttttgggtacgtacaggccctgacctggcatcgagcagccgcgaacgcagggtcatcactgcctcacaggtgctctgcttcaactgcatctggatggcgctgaacttgccgtgaatggcgccgaccatgcgctcaatctccttaggggagacaggcctcatcctgctctgctcctggaggaggttggtgacgtgcgtggtgaactcacgacaggcctggggtgggagcacagacacgccggcctgtgactaggcagcagggtggcacagggcagcaggttccacagcggagcagccgcctgccaccccctgtagttcacacaccggcgggtgactgttaagtaaatggaaagggctttcagtaacaatggaccacctctgcagcgaccaactgcatggactccctgttctgcgccacgaaagaaaggtggttagcgttccgtgtttcgctttgacaaatgcgcattcacatgacagaaactcttccatgcagaaagatcacctgttcatatttctctagctcagagtggtaaatctgtcggatctgggacagcttggccctgtagtcagagtgctcaatgctattgtcatttggacagccacctggtgttgctgtgccggccctggccaccgctcctcctcttcctctcttctcgggcctgcacacgccctcagccagcagcatgttatccagcctcaggagctgggcgtcagggggatcttcgtcttgaatgccacggatgcttaccactagataagagagaccgggacaagtcacaattcattttctggagagaaaacaaaccatgagaaaatgtgagcactggtgttatgtctgaagatttttgcatagaacccttcgggagaaaggaatactccactttatcaccaaattggatgatggacactgagcaccccgctaagacatgggtccaagtgccatccttagagcgcagtctggggaggaacggggagacacaggtcgcagtttggcatagcctgtgagggcaaaccttggtcacagctgtgtgcacgcagcagggccaggcaggcgcctgttgctggggtcacctgaacccctgaaccgagtctcaagaagtgctggggaagagggggcacccaagatgctgcatactgataaaggcaagtggcaggctggcattggcagcgtggctggcctgggcccaggactgtgcagctgtaggcctgttgtggctggtgggtggggtgtgtgtgtgttggggtgggggtgctgttataaaactggataggaaaagcctgataaagaaagtgccagaaaagatgaaataacccactgaaagattttaagcagagaaacaagataatgggccctacaatttggaaatgccgtcccagctctgcagagaggggacctggataggggcagggctggactgcaggggaagcagtcaaagggcagccaccatcaaggtatacacagctgtggggtctgcaggtcagctacagggcagtcagagaacccccaggattcgtgtcctgggacacgggtgtcagagaagggaagactccagggtcattcccagattctgccatgggcagcacagccaatggcatcgcattctcccaagtaaaaagcctggagctgcagcttgtgcaggtggggctgagtgaaaaggtggcttcacggccgggcacagtggctcacgcctgtaatcctagcactttagaaggctgaggcgggcggatcacttgaggtcaggagttcgagatcagcctggccaacatggtgaaaccccgtctctactaaaaatacaaaaattagccaagcgtggtggcgcctgcctgtaatcccagctactagggaggctgaggcaggagaatcacttgaacctgggaggcagaggatgcagtgagctgagatcttgccactgcactccagctggggggatagagagaccccgtctcaaaaaaaaaaaaaaaaaaaagtgttctcttagaatcaggcttttttttttttttttttttttgagatggaatctcattctgtcacctaggctggggtgcaatggcatggtctccactcactgcaacctctgtctcccaggttccagtgattctcctgcctcagcctcccgagtagctgggactacacatgcgtgccgccatgcctggctaatttttgtatttttagtagagacaaggtttcactatgttggccaggctggtctcgaactcctgacctcatgatccgcctgccttggcctcttaaagtgctgggattacaggcatgacccaccgtaccgggccagaatcaggctatcttaataaggtcagctacttaccgaattagtgctcagatgacaattccgtttgattatatcatatagtcatttacaagtgtccctttcttattccctacataacagatgaaccttttctgtcaaaaactcactagtcaaaactgaaggaactcaagcgatatccttgtaagaattttccttagagatttccacttcaggctgggcgcagtggctcacgcctgtaatcccagcactttgggaggccaaggtgggcggatcacctgaggtcgggagttcgagaccagcccagccaacgtggagaaacgccatctctactaattagccgggcatggtgtcgagtgtctgtaattccagctacttgggaggctgaggcaggagaattgcttgaacccgggagacggaggttgcagtgagccgagatcacgccattgcactccaggctgggtgacaagggcgagactccgtctcaaaaaaaaaaaaaaaaaaaaagagatttccacttcaacacttagtgctagtttattaagcacacatgcaacaaattttataaaccaggattttgaacaagagacaaaaaaaattagcaaccagatccaaggactgaccacaaacctggtgcttaatacaggatagtgttggccaggcgcagtggctcacgcctgtaatcccagcactttgggaggccaaggtgggtggatcacctgaggtcaggggttcgagaccagcctgactaacacagagaaaccccatctctactaaaaatacaaaattagccgggcatgatggcacatgcctgtaatcctagctacttgggaggctgaggcaggagaatcgcttgaatccgggaggtggaggttgcggtgagccgagatcacgccactgtactccagcctgggcaacaagagcgaaactccatctccaaaaaaaagaaaaaaaaaaaatatacacacacacacacacacacacacacacacacacacacacatataggatagtgtcccaccttctccaaaactgtttcttactcaattaaaattggaaaaagcaatatgagaaaagtgggaagatttcaagaagaatccacacaccctgttaaactttcaaggtagaatagatggcggcacaaagttgcagacatgcagagacttaaccacaagtctccagtacccaggcagcgaatgtccatggcacaaattagtcatgcaaattagacataaatttgtctaatttgataataagaacataaactataatagaaacagccaaaatagctaatacatgagattggttaagtaaattatgatagaaccataaaataaagccgccagcaactctattttcctttttttgtttttttttctgagatggagtcttgctctgtgtcccaggctggagtgcaatagcacaatcttggctcactgcaacctctgcctcctgggttcaagcaattcttctgcctcagtctcctgagtagctgggattacaggcgctcgccaccatgcctggctaatttttgtatttttagtagaaacagggtttcaccatgttggccaggctaatctcgaattcctgacctcaagtgatccacccaccttggcctcccaatgtgctgggattacaggcgtgagtcaccacacccagcctcacacccagataatttttgtatttttaggagatacggggtttcaccatgttgcccaggctagtctcgaactcctgagctcaagcgatccacccgcctcggcctcccaaagtgctgggattataagcgtgagccaccgcacctggcctgtttctaaaatttctaccaccaagtctatgaaaaatcatcaccaggaatgagggcatcaggatacatccccttgggaggctgaactatatcagagtgggtattcctcaaactgcttttgtgcatatcactcaagcttggccctgtctcttcatagacgccctcctctgcctccacatacttatttaagcagacactacaggctatacttggtgccagctccctgcagcccgtggccactgtggcccttggcctcagagcttcagaaaacaccccctctccctgagtgccaggctgaactgaaggttcccaccacctcacactcaaggaccctcctcaccggctcactcagtctctttgggctgcaccgaggctctttctgagatggctgaaggaaaagtgtcccttttattagctggcagacagccttccagtttggtggcccaattttcctttttttttccttttttttttttaaagacagagtctctctctgtcgcccaggctcaagtgcagtggtgggatctcagctcactgcagcctccaccttctgggttcaagcgattctcctacctcagcctcccgagtagctgggattacaagcatgcgccaccacgcctggctaatttttgttttttgtttgtttcaagagaattcaatcgtttattgattacaacgtttgtatttttagtagagacggggtttcaccatgttgaacaggctggtctcgaactcctaacttcaggtgatcctcccacctcggcctcccaaagtgctgggattacaggcgtgagccaccacgcccagcctggagactcaattttctaacaatcttactttatcttcaagaagctccaccatcctggctaacacggtgaaaccccgtctctaataaaaatacaaaaaaaataattagccaggcgtggtggcgggtgcctgtagtcccagctactcaggaggctgaggcaggagaatggcgtgcacccgggaggtggagcttgcagtgagccgagattgcgccactgcactccagcctgggcaacagagcgagactctgtctcaaaaaaaaaaaaaaaaagctccagctgtctgttttagttcctcccactgccagcacccatgagcgaggacagcccacttggaatgatgctcatggggtgctgtgcctacaatctgggccttacagatctgggtgacagtcacagcaagtggacacccttggacagccaggtaaaggccgctcccagaattagcctgtgtttgcctattcctcgtaataaccctcccctctcctcctaatctctcctggctcaaaacagacaatggctgtcctctctgtagtccctctgttttcaaatcctattgattctgcctcaacaatcaactttccacttatccctccctaggtccctactgtgctaaccctctcctgccctttgtgacctgcggaggaaagtctctcccctcccatccctcatgcacacctgcaggccaacccttttcaaacacatcatgctgctcttttgttcaaaagaaacccagcctctaacatccttctggacctgcctttggaactgttccctcgcggagccttgcacagcctctgacaagcacagatgtcccacgtgcccctgaatcttgttcaacagctccttcctgagcacccatggaggtcgcggccaggtgtcatgtgtgggcggaggatacacaggactcagtccctccacacaggaccccagcatgctctgacagccggggtgaggaaagccacctccacaccttccattacaggcccatttgaaatagggaaaggagcatggtcaatgttggcacatgcagtgtaatgagagtgtgtgtgttcatgtgggtgtgaaatgcagggctgccgcagaatatgtggcattctttcattcattcatttatgtatttaggggctgggcgaggtggcttatatctataatcccagcactttgggaggctgaggtggtaggactgcttgacctctggagttcaagaccagcctgggcaacatggtgagatcctgtttctaaaaaaattttttttttcttgagacgaagtctcgctctgttgccaggctggagtgcagtggcacgatctcggctcactgcaacctccgactccttggttcaagcaattctcctgcctcagcctcccaagtagctgggattacaggcacacgccaccatgcccagctaatttttgtatatttagtagagacggggtttcaccatgttggccaggatgatctcaatctcctgacctcgtgatccacgcaccttgacctcccaaagtgctgggattacaggtgtgagccactgtgcctggccaaaaaaaaaaattttttttttaaatcatttacttatccaacaacaaacatctgagagcccatcacaagccaggtaccacactaagtgttgaggatttttattgtatttattatttttggggtctgtctctgttgcctagggtggaatatagtagcatcatcatagctttctgtaacctcgacctcctggggtcaagcgatcctcctgcctcagcttcctgagtagttggaactatacacatgccaccacacctggctaattttttatttttgtagagatggcatctcactatgttgcccaggctggtctcaaactcctgtcctcaagcgagcctccaccttggcctcccaaagtgcttgggattatagttgtgagccaccacacctggcccgaggattttaaaaaaatataccaaaacccacaggacttactgttctccaattaaaactctcaaattacagtgagaggctgaggcgggcgaatcacttaaggtcaaaagttcaagaccagcctggccaacatggtgaaacaccatctctactaaaaatacaaaattagctgagcatggtggtgcatgcctgtaatcccagctactcaggaggctgaggctgcagtgggccaagattgtgccactgcactccaacctgggaaacagagcgagactccatgtcaaaaaaaaaaaaaaaaaactctcaaattaaagtgagaacacctgtgcctttccatttactcttcatggggtatgcattgtacagcatttctggagaagagttttgagatactggttaaccttgaaaaagtgcataatctttaatctccaaattcccattctgtacctggaatttatcctacaggggtactgacacctacaaagatgtatttacaggaggcacagtgtttgtaatcgtgggcgaccagaagggtgcagatgtgcatgagtttgggcacagacagcatacctgtcaccctcgggccctgtggtgtcacctgtgtctcttgagggtgccattatgaggcaatcagatgtgataagccttatttctttaagattacacatttttggccgggcttggtggctcacgcctataatcccagcactttgggaggtgggtggatcttgaggtcaagaggtcgagaccatcctggctgacacggtgaaaccccatctctactaaaaatacaaaaattagccaagcgtggtggcgcgtgcctgtagtccccactacttgggaggctgaggcaggggaatcgcttggaactgtgaggcagaggttgcagtgagctgagatcgcgccagtgcactccagcctggcgacaaagggagactccatctaaaaaaataataattaaaaaaaaaagattatgcttttgaggctgggcaaggtggctcatgcctataattccagcactttgggaggccgaggcaggcagatcacttgaggccaggagtttgagactagcctggccaacatggtgaaaacccatctctactaaaaaaaaaaaaaaaaaaaaaaaaattagctaggtgtgatggcacaagcctgtaatctcagctacttgggaggctgaggcaggagatctgcctgaacccaggaggtagaggttgcagtgagccaagatcatgccactgcactccagcctgggaaacagcaagactccatctcaaaaaaaaaaaaaaaaatgcatttttgctatatatgtgttataagcaaaagcaaaacttaaaaagctaagttaccgaggagaaacgctgtgccttggtcaccaccatcagtccatgctggggacatctgccctgccagctgcctcttgggtggtgcctacaacagcttcctcagcaccgtgcctttgtgctccccgtacactgatgctggcctaattatggtcattagacatgcattaccatcaattacagcaagctcagttccggtgactgttccagagcttctcagctgtgctcctcagctcccccagggcccttgactggcaggcagggaggctggaggtaccagaagcttggttcagggataccatctgtcggaggcactgacatggggaaacagacttaaaacaaaggtacccccctcctcaaactgccaggcttccttctgttcccaacttactgtgtgtggcagaaactccagtaaatcaaacaatgacataaaataaaatcgggattatgtttttctaagaaacaatatggcaatgctgtgagccgaatgtttgtgtcacctccaaattcacatgtcgaagccctaactcccaacgtgactatttggaggtgacgcttttaggaggcagttaaggttaaatgaggtcataaggatgtggccctgatctgataggattaatgtcctgatgggcagagacctcagggagctcgctttccctaagaggtcatgtgagctcacagtaagatggcggccgcctacaagccaagagaaaaggcctcataatgaactacctggccagcaccttcgtctgggactttctaggccccagaactgtgagaaataaatttctattttgtaaaccacccagtctgggccgggcgtggtggctcatacctgtaatcccagcactttgggaggccaaggagggtggatcacaaggtcaatagatcgagaccatcctggccaatatggtgaaaccccatctctactaaaaatacaaaaattagccgggcatggtggcgtgtgcctgtaatctcagctactcaggaggctgaggcagaagaatcgcttaaacctgggaggcggaggttgcagtgagccgggattaagccactacagcctggcaacagagtgagactccgtctcaaaaaaaaaaaaaatcacccagtctgtggcattttgttagggtggcctgagtagactaagacagtaacataaccccaagttgctttaatttttctccccaggaacaaagacgtggggaaaagcagaaggctcagagggaaccctcctttgccctgacttccccaagctgctcacctgccccctcacccactcagcagtgctctcacttggcagcgggctgtgctcccgcctccttcccacagcaagtgggaaccatctctgggaccccagccccatagggagaaggctaacccatggattaaatcagatgccctgactgacccctcgggtctgccactttccagtcatgtggctgtcagtggtcactccgctggccgcaagccccagttgtgaacggagctgccccaggcaactgactggatggaattacatagaaccgcaggcccggcccagagcccatcagggtatgggactaagcaaaacactcacctcacgctctccctgctgtctcaaatcagcaagaagctggcccctcaaaagcagaggcagggcctcctgtgccaatcaatcgatcgtggaggctgagcctcctccccatctccccccaccatccacagccggaatgagcgttggagacggattaaactgtggaatctgggacagagggttgacgcctggtgagaggcggccaaatctctctttgaggagtcctttggtgacagagagccaaagcctagtgcgccgacctgagttgcaatgagtacctatagtcacagcttgctctgatcacacaggcgcaggcgcagacaagcatgtccgcctgccctcgggcccacccaccgtgtctggaactgacagtgccggtgactctgcacaggtgagaatcgacatgaaggagaaaacatggggacttcctgctttctagaaaccttttgaggctttttcagtcacttactgagcacctactgagtgctgggcctgagctttgaggatgacaagtggctgctgcttgccctggggggataagaaccagggtcttgctgctgctaccggggtctcctatgctactggcctcctgaccagtgacccttagaaagaacggggccactggccacagttctgccggtgggacccagcgtggtaactgggacctgggctgaggttaactttcctgttccagttttcagaaggagagctcaacttccatcagctccagcttatcttgtagtcaaagagccaaaggtaataaggaaatgagttctacaaggcattctggcaaggtgctcaccaggagccactttcatttgtagtgagagtgtttcctccctaaacaaggcctctgatattggaggacagggataggggaggcaggtggtaaataaccttctgtacttagacctcaactgcttaaaagaaaaaacaccagctactggggaggtcactcaggcaggagtgcagtggcacgctgcagccttgacttcctgggctcaagtgatcctcccgcctcagcctcctgagtagctgggactacaggcatgcgccaccctgcccagctaatttttatattttttgtagagacgaggttttgccatgttgcccaggctggtcttgaacccctggattcaagtgatcctcctgccttggcctcccaaagtgctaggattacaggcatgaaccactacgcccgaccagattttaccttgtttagagtaggactcctagaaaggtgatctgtcctctgggccagcccacacctgtcacctgcctacagcgaggccagcacagacaccagcatccgcacatggaaatgtattgcaatttgacagagtaatttgatgtctattgaatttaacacaacttttggccttactgacttgtatgtctgttttatttttcctttcttttccccagtagttcatcttgcttctgttttacatggccaccatgctggggtggccaaaaccgtgcctgaggctggaggggcctgaaggctgagcctgagctgctgctggaagctctgatgagcctctgaaccaccccagtcccagatccaaactctcagggcccgtaagagctggggtggaacagtccagaattgagagtaaacctatttcctcgcacgcatctgtaggatgcctgcttcccctctgcgtcattactgtcttgcgggtggcggtggcactgccacttggaaggagccggcattccacgttcctgtgtcagggaggtgatgacacagggcagagcgcctgctccagcacttccagtggagaaaacaccaggacaccaaacaaggaaggggagacaaaggccacgctgcaggaggagcgacctactcactttgggagacctgtttggtgggaagcaggcctgtccaaccccaagaatgccagcccaggggtgtcaggaaggctgcgggaacccaggtcatgcggtgctgccattggctttgggagctgagggactggataaggttattggccaaggaaggtgttcctgccacgatgcaaggtgacagtgtgagaataggtgggggcttccaagtggctgggtggtgctctgagcagcaggagacgagactggctgtgagaggcctatggaggaagtggtaccgcctgattccccaggagagtgccctgggatgtgaaggacatcgtggggtggccccagcaggaggctggggagcccaacacagtgaaggcagaaggccagcaggactcttccatgagaacccaaggccccctacctttgggatctggcctcatttgctcctggcacctcctcccaccccccaaatcctgctgctgcacactcctctcacctctcagctccaatctagcttcccagtgatacgggagtggggcaaggaagtgctgggtagagaagggcggggtccctggcgagggctccaccctcggccctgtgccctcggacctaagtgagaacaagcatttctgtttttgtggccaaaaggttgccttttggcctgccacgccccacatcttgtgcccaaataagcctgagaccttaagcagacacacacaagcagctggaagtcgagaggaacacaccagcagaagaacacaccaatagacactggcgggccattgatggtggaacaatgcagacaccaagggaaatccaggagagcccagtcactgagcggcccaactccagggcaaaaccaccttcccaatccaaccccctttgggccccccatccatctgctgagagctacctacaccactcagtaaaaccctgtactcattctccatgcccacatgtgatccgatttttccagtacactaaggcaagaaccccagaatatagaaagccctttgtccttgagatagggcagagggtctaactgagctgattaacacaagaagcctgcttctctttcagctaagctgaaagagcacactgtaacgcatgcccactggggctttgggagctataaacacaaccctaagacgctgcgctgctgctgtggggttggagaccacgttccccccacctgtctgactgcatgctcccccttaggggtttgagctgtggggcaccgaagaagtgagccacatccgtcacacaccctgcaagggggaaaagggaacactcctgtttcacccgggctccgggaacaccaagctcaggcctgcgtcatgaactctttcccagcaagagagcggaggtggccaggcgcggtggctcatgcctgtaatcccagcactttgggaggctgaggtaggtggatcacctgaggtcaggagttcaagaccaacctgaccaacatggcgaaaccccgtctttactgtgatcccagctacttgggaggctgagacatgagaatagcttgaacctgggaggtggagcttgcagtgggccgagatcgtgccattgcactccagcctgggcaacaaagcgagactccgtctcaaaaaaacaaaacaaaacaaaacaaaacaaaacaaaacaaagatgcagaaaggccaggttcagtggctcaccctgtaatcccagcactttgggaggctgaggtgggaagatcacttcagctcaggagtttgagagcagcctgggcaacatagcaagaccccatctctacaaaaaattttaaaaaatgagtcaggtttggtggcacacacctgtaatcccagctactcgagaagctgagacaggaagatcgcttgagccccggagtttgaggctgcagtgagctgactgcgccactgcactccagccagttcgacaaagtaagaccccctctcccaccaaaaaaagatacagaaaattaacaaaatcaattaaaacccttgggcaaacctggtcaggcacggtagctcatgccctaatcccagcactttaggaggctggggttggggggaatcacctgaggtcaggagttccagaccagcctggccaacatagtgaaaccccatctctactaaaaatagaaaaagctcacgcctgtaaacccagcactttgggaggttgaggcgggaagatcacctcagatcaggagttggagaccagcctgaccaacatggagaaatcccatctctactaaaaatacaaaattagctgggcatggtggcacatgcctgtaatcccagctactcgggaggctgaggcaggagaattgcttgaacccacgaggcggaggttgtggtgagccgagatcatgccattgcactacagcctgggcaacaagagcgaaacttcatctcaagaagaaagaaagaaaaattagctgggtgtagtggtgcacacctgtaatcccagctactcaggaggtggaggctcgagaaccgcttgcacccaggaggcggaggtagcagtgagccaagatcgtgccactgcactccagcctgggtgacagagcgagactctgattcaaaaaaataaaaaacccacaggcaaatcaaagaatagaaagaaccttccttaacctgataatgggcatgtcctcaagccccacagcaaaccccagtcttcctggagatattttaaagccactgattcaaatcagacacaggtagacagggaggtccctcctcggctcagaccagcagggtccagtcaaggagaccagaaactcgggagggggacagaccagcaggcagcaaggcatgacgaagaagatgtgacccactcacaggctgaagggtgtccctacagctggagtaacccagagagtcatggatgtaatggacaacttcccctcccctccacactgcccccaacagacctcaaggtgtggtctgacatgaccaagggctggttttttttttttttttttttgagatgaagtctcactctgttgcctaaactggagtgcagtggcacaatctcggctcacggcaacctccacctccagggttcaagcgattctcctgcctcagcctcctgagtagatgggactataggcatgcaccaccatgcctggctaatttttgtatttttagtagagatggggtttcactatgttggccaggctggtctcgagctcctgacctcgtgatcacccccttggcctcccaaagggctgggattacaggcgcgagccacctcctggcccaagggctgttttatcttatggtttcctgggcatcatgggcactgagtttactccttaactctaaacaaggagacttctggagcccagcctgtttgtattaagaactgcctggctttaccttttaggccacatcccacaggttagttcatttaagtaacattctaggacaggcgctagaacaggctttgttctgttctctgaggcagaccagcctggccaacatggtgaaaccccatctctattaaaaatataaaattagctgggcgtggtagtgcacacctgtaattccagctacttggggggctgaggcaggagaatctcttgaacccgggaggcagaggttgaggtgagtccagattgcgccactatactccagcctgggtgacagtgtgagactccatctcaaaaaaaaaaagtaacattctagataaatccttatcttaagtcatggaagtttctcagatccacaggactttaaaaagaataacccttaaaaaacactcatcagtttctgaaatagtggctgccacacactagatattcacccaactgagggattatcacactaggcaaatctccgtcatctctaattaaaatacatcacaaccagtcacaactgaagtgtgtcaggcctctgagcccaagctaagccatcatatcccttgtgacctgcacgtatacatccagatggcctgaagccactgaagatccacaaaagaagtgaaaatagccttaactgatgacattccaccattgtaatttgtttctgccccaccctaactgatcaatgtactttgtaatctcccccacccttaagaaggttctttgtaattctttccacccttgagaatgtactttgtgagatccaccccctgcccaaaaaacacattactcctaacttcaccgcctatcccaaaacctataagaactaatgataatcccaccaccctttgctgactctctttttggactcagcccacctgcacccaggtgaaataaacagccatgttgctcacagaaagcctgtttggtggtctcttcacacggacgcgtgagaaatgaagatgctggaaccacaatcaaatatgcaaattaatttcatttccatatgtttacatgtttgttaattaaaacactgcagttctgaaataaactagtatgtgatttttaaaaaaatgcctactgttctgtacatttaaaaaataaataggctgagcatgtggtggcttatgcctgtaatcctagcactttgaggggctgagacgggaggatcacttaagcccaggagtcccagaccagcctgggcaacacagcaagacccccatctataaaaagtacaaaaattagccggatatggtggcttctatctgtagtctcagctacttgagaggctgaggtgggaggatcacctgaacctgggaagtcaagaatgcattgagccatgatcatgccactgtactccagcctgtctctttgagacagagcaagaccctgtctcaaaaaataaacaaacaattatatgagctgctaatgctgagtaaaaatgatatgcggtttaggcttgtttttctgtgctactgtccttgcatgtggtaacagggcaaaaggaagacagcaaaacactgtaatatatagtgctgtaatatatatttttccagatgtgccaggcagcacatctggaaaaacaagcccctgtgaggagttgcaaacatttaagagccacagctaagaaaaacagcacttggccgggcatgatggctcctgcctgtaatcccagcactttgggaggccacgaagtcaggagatcaggattatcatggctaacacggtaaaaccccatctttactaaaaatacaaaaaattagccaggcgtggtggcatgcacctgtagtcccagctactcaggaggctgaggcaggagaatcgtttgaacccaggaggtgaaggttacagtgagccgagatcgcgccactgtactccagcatgggcgacagagtgagattccgtctcaaaaaaagaaaaagaaaaagaaaaagaaaaacagcactcactgatggcttctatctaccataaacaattttctttttctttttaatttttttgagacgcagtctcactctattgcccaggctggagtgcagtggcacaatcttggctcactgcaacctctgcctctcaggttcaagtgattctcctgcctcaccctcacaagtagctgggattacaggcacccgccaccccacccagctaatttttgtttttttgttttgtttttgttttttgactaccagaaaataaacacgaactttattaatagcaatagaaagggtttccaatttctcagaatgaaaataacatgacaccagtacaagtgttaaaacagtaggccgggagcagtggctcacgcctgtaataccagcactttggaaggccaaggcgggcatatcacctgaggtcgggagtttgagaccagcctggccaacgtggtgaaaccccatctctactaaaaatacaaaaattagccgggcgtggtggcggactcctgtaatcccagctacttgggcagctgaggcaggagaactgcttgaccccgggaggcagaggttgtggtgagccaagatcgagccattgcactccagcctgggtgacagagcaagactccgtctcaaattaaaaaaaaaaaaaaaaaaaaagagtaaatgcctacatttcttgttctgatagcttcccaccacacaccaaaggttcctcaaggacagctgccacagagctgctgcaagaacatgttttccactgagcgtagtttcacagtcaactactcaagcagaagactaaaatattatttctttttagaagatcttggttgagggagcacatatcaatatggagaacagatctttgcttctcgaattcaagaaaaaacattaattaatctatcagtttttctccgatacagtgtcccagagtgctctgtgaagaatccttttacatccctactacatgcctgggtgaagggagaggagggggtggcaagctgccagtacaccagcaggcactcctggtgatgctctgggctctgctccctttctgctggtaatagtaggcatcttttctgaaagctgcagcagcttgatgtggggcggtggggaggaaggggccacttaccaatcacctcttcttgaagccgtattttttgcgttcatagaagaggtcttagagctccccaaatagacaatcttcaggcagccatccctattcttctcctggatggtgcactccttacaataataggcatcagagaccccagggcctccacagatcacacagagccccggtaagatccatagttacattcatcacatatgcacaccagagtgcagggacgcacataggagtcacagataacacatttgccatcacatttttcacacagtcatctgatggcaacaccagcctgcttgcggcaaaagatcaaatcaggatgatgtttagccatagttcccaactaagctggccaccacacaatttttgtatttttagtagagacagggtttcaccatgttggccaggctggtctcgaactcctgacctcgtgatctacccgcctcaccctccgaaagtgctggcattacaggtgtgagccaccgtgtggcccaattttttcatctgaagaaatgctctaatttcaaacaacaacaaatgagagccatgggggaaaggtctagaagcttcaggagctgggctacagtcaccatgaggtgtggtgcctctttggctgagtctcacacagggaggtaaccagcctagcaacatgcacactaaccatgaccaaccaattcccagcctgcgaatcaaagagttttaggtcatccaatgccctgactactctaaaaagaatttcccaaggaactgatctatcaataagttcaccagggctggacaggttggctcatccctgtaatcccagcacttttagaggctgagaagggaggattgcttgaggacaagagtttaagaccagcctgggcaacacagcaagatcccatctccacaaaaaaatatccaggcatggtggtgcccacttgtagtcccagctactccagaggctgaggcaggaggatcacttgagcccgggaattcaagggagcagtgagctatgatcacaccagtgcctccaacccgcatgacagagcgagatcttgactcaaaaaaagaacgtaaaaagaggctgggtgcggtggctcacacctatagtcccagcacgttgagaggtcgaggccggcggatcacgaggtcaggagatcgagaccatcctggctaacacgatgaaaccccatctctactaaaaatacaaaaaattagaggagtgtggtggtgggcgcctgtagtcccaactactcaggaggcggaggcaggagaatggcatgaacccgaacccaggaggtggagcttgcagcgagccgagattgcaccactgcactccagcctgggcaactgagcgagactctgtctaaaataaataaataaataactaaagacaaagaaaaagaaagaaaaaaaagttctggtcaggcacggtggctcatgcctgtaaatcccagcactttgggaggccgaggcgggtggattacctgaggtcaggagttcgaaaccagcctggccaacgcggtgaaatcccatctctactaaaaatacaaaaattagttgggcatggtggcgggcacctgtaatcccagctacttgggaggctgaggcaggagacccgcttgaacccgggaagtggaggttgcagtgagccgagatcgcacgattgcactccagcctgggtgacagagcgagactccatctcaaaagaaaaaaagaagctccctagtatctacggtgtgccaatcccacaacagggcagagatgaaccacagatctgccttgtgctttcttgatgctggtcttccaggaaaggagtcagaggtcagaagacaaaccagaaaagtgcaagcacacaagacagtttccgtcagtggttaagccctaagaggcagcaaagaagtgctaattcataagaatgtgtatgtgcactaaggccttaagctacaggcacactgttttagatacggcccctaccaaagaccctcaatccttgaggtaagctttattgagatataattcacatgccatataattcatctgcttaaagtgaatacttcagtggtttttagtttatttccaaggttgtgcgaccaccaccactagctaacattctcatcctccctaaagataccccgtctctatgagcagtcactctttacgccccctccctagccccgggacaaccacgagtcttcctgtctctatggatttgcctgatctggactcttcatattgatggaatcacacagcatgtgatgtgacacttcacatctggcttctcctacccagcatcatgttttcaaggtgcacccatgttgcagcctgtgccaatacttcattcctctttatggctgaataatactccattgcatggatggaccacgttttgttttgttttctttcttttttttttttttttgagagagagtcttgctctgtcacctaggctggagtacagtggcgtgatctccgctcactgcaacctccgcctcccaggtgcaagtgattctcgcgcctcagcctcccgattagctgggattacaggcatatgccaccacgcccagctaatttttatatttttagtagagacggggtttcaccatgttggccaggctggtctcgaacccctgacctcaaatgatccccccaccttggcctcccaaagtgctggaattacaggtgtgagccatggcgcctggacacacattttgtttttctagttatcatggacatcaggttgttttcagattccttaatctgtatatttatatacaatgatccacttctctgtccaacagacactttggcaatgataggatgttctagacctttctattataggaggcaccagccctgtgtggctgctgagacttgaaatgtggctggtgtggctgaggaatgcactggttaattgcatttggttttaattaattcaaatgtaaacagccctgcgttgagtatctggagccacccagctgatgagactcaggggctcaatttgtgagttaccctgagactgaggggaggaaaggatactccaatcaacctggagaataagtcccccagctgccggggtctactcccacaagaaccctaaagaaatgtacatgggactcagccccagggtacagctaattagaaaaaggatctcagttccagagaggtgactcataggcctcagggtgactgctaggacccaggaaagccccatgagcaccatgacaccccagcttcctggctgaatttacagaacccgattctgtaattgcaacagatccgaccagctgacgaggaagggaaagaatgagaatggcttatgcctgccaactactagcaaggccaatcattagtcaggaagacaaaaaggcattccctgatgttatgcattatttacatttactcctctgaatggggctctgtgcgttcctacagcacagcaagggttcctgcagcacaacagccctggctgagaaacttcttgttccccagagacacagtcacagggtggagaaggcaaagcaggccccttctcaagaacggcccaggatgggatggccgagtgggtctgcaaggggcctctggggctcagcacaccgcctcggagctgcctacccactcgagatctgagatccgaagcttttcacacaagctgtcactcatgctcatgtggaggtaaagcctgacacattccaacgtgccaggctgtccctgctctggtgccaaacaccactgtgtgaattcaggccacgcctcagtcctcactgggaacatcaatgtgacaaaccttattttttatttttatatttttttagaggcagagtctcactttgtcgcccaagctggggtgcagtggtgtgatctcagctcactgcaaacctcacatcccaggttcaagtgattcttctgcctcagcctcccgtgtagctaggattataggcacccgccaccatgcccagctagtttttgtatttttagtagagatgggtgggtgagggaggtgggggggtggttcaccatattggccaggctggtctcgaactcctgacctcaggtgatccgtctgcctcagcctcccaaagtgctgggattataggcgtgagccactgtacctggccaacgtgacacatcttaaatccaacgctttcgaattctgcaacatacctagtcccagggtctcagcaaagggactgtggcccgtatctggttctcccagctaaattcaaagctctgcaactaatcagggtttattttgttctcagaacagctcctctagacaccgaggaggacagctgtttctgggaaggagggtttgggaggaaatgcatacgctgagggtgtccttggccttcagagaccaccgcagggcaggaacacccagacactgtggtgtggtgaagctgaccccaggagacaagctttgagggacctgcctgcatacctccgacaggccattcctggggttcaccagggactgctggcagtgcatccggtgatgccaggtttacatggaggaccacgttcttttcaggctgctgtgagtgataagccctgtgttctaagtcaggcccccagacactgaatcttctgaacctcataaggggaactggatgaaagggatttcagttagtatgtatcagtcaccagaaacagtttttcaatcaacaaaaacagaaaggcaccgggacagaccctgagaacatagcgcatcctagaccctgcgctggccaggaatggtcattgttcagatgacacaggtgggtgtgtggggcccatgagtgccggccatgagggacaggccctgggtccctttcatgagtgaggacagtgtacggggtggggcggcatgcagcctggctgtgggtgactggtgtgccctggggaggcccctgtctcttagagcttcccactgcccatctgtaaaacgggagaaaagggtctgcccgaggctgtgcagggctctggggaacaactcgaggaagccccgagctgcctgcccaggctccatcaatacccaccagacttaatctttgccgttgttgttgttgtagagacagggtcttactgtgttgcccaggttggtctcatactcttgggctcaagcgattccaaagtactgggattataagtgtgagccaccatgtcctgccccaccaggctttaaatgctctgtggaagtttggtctttaccataaggcctgctgcagacttcagccagagggaaatgtgagaactgtgggttaaatcgagaagcacgccaggaccccggctcatgggattgcccttcaagaggcggcccgtgggtaccacagggtgcaggatcaggaccatgaacagtttcctctgggctgagacttggccattcctagtcacgggatgaggacagatggagcagaatcgaaatcctgtttactttcctgccactggctggtttgtctccgagactagaaggctgaggtgttcctgacatcaaggcaggtggcccacaggtgggacccacagcactcactgactgcacttcctgatataaaaagatacctggacactccaggtgacactcaggaacaggcatccctcagctccaggcttgtgcatttcagggaggagcagttgctgtctcatccctgtcctactgtaccccaaaacataccctgtacccagatgtttgagccagtcagtgggaagaaagcattagcttccaaggaaatgcccaggtggccggtgctctgagccctgcagcggccttgggactcagcttggaggaatcaaaagtcctgagtggccaggcacagtggcgcctgcctgtaaccccacaccttgggaggctgaggcaggaggatcacttgagctcaggagttcaaggccaacctgggcaacatactaagacctcatccccccaaaaatagtcctcagcgacccctagacatggtggtgtgtgcggaagctgaggtgtgaggatcacttgagcccaggagtttgaagccaatctgggcaacacagtgagactctgtgtcttaattaaaaaaaaaaaaaaataaaaaataaaaaattaaaaatgtcgccgggcatggtggcacatggctgtaatcccagcactttgggaggccgaggcgggcggatcacctgaggtcaagagttcaagaccagcctgaccaacagggtgaaaccctgtctctactaaatacaaaaaattagccgggtgtggtggcagatgcctgtaatcccaactactcgggaggctgaggcaggaaaattgcttgaacctgggaggcagtgagccgagattgcgccattgcactccagcctaggcaacaagagtgaaactctgtctaaaaaaaaaaaaaaaagagtcctgagcatggccctcaaagcctaggcagatgggggtagggaggtggggcgacaccagcggttgaaatggacagacatctcagctgcactggcaacagttggtatcaactcttgttttccctcctgaaactgctgaatttgagactaacagactcatgcagtaacatccacacaggggcagatggaattatgaagaggcgtgcccaggctgaacacccacactctcaaaaattggtttctcgttcagccccagcagctcactggtaggaaggtcaagaatgacagcttcctgagactacagttgattaaagtactttttttttttagacagggtctcactctgtcacccaggctggagtgcagtggcgcaatgtcatctcactgcaacctctgcctcctgggttcaagtgatactcctgcctcagcctcctgagtaactgggattacaggcgcatgccaccacgcccagctaatttttgtatttttagtagagacggggtttcatcatgttggtcaggctggtctcgaactcctgatctcaggtggtccaactgcctcggcctcccaaagtgctgggattacaggcgtgagccaccgcacccagcctttaaaaagtactttttaaaatagttttttattattactaaattccagatgttgcattgctaaacatccgctgtgggcagtggggagcccccaaaggctgcttcctggggtcagggtcaggggtgagcaagggacaacttgggctgcctgtgcctattggtacacatgcctcagcaagtggtcctgacactggcttatttttattaggtgaaaagtgaaagggaccaacattacacaattccacaatactaagaaacacgtgaccacagccagtgtctccagggggtggatacacattggctgtgtccttctgagcggcttccctcagcctgcagtacttggggctcattcgggtacagggcccccgcttgtccagcttaccacacgaatgctgaagcaccatcagggagtgctgccagggagttgagggcaaatttgcttaaaaccagttcaccgctaacaagaaacttgtgtgtctggttccccaggaaagcctaacctttgtgtttccatttccatggcatctgctccccacaatttaaataaggaacagataagacaggtcatcagatatttacatacccatgagaggcatatgaggtgggcaggaagccaggggcatcacagcccagcatctggccccgtcgggaggatgacctggcactgggtgttggagaccaacagggggcatatcatgtgggggctgtcagcagcagcagtctgctggggggtggggacaaggaggggtctgcttggctgggggattaagtatacttgggggtgaaggaggtgggagattgattacacaagcaaaagtactgaggacaacaggagcaggctctcactgttggaggaaggagtcacaaacctgggaagagagaaaaatagtgggaaccctgtggtgaactagaattaaagatattggagtgggccaggtacagtggctcatgcatgtaatcccagcactttgggaggccaaggtgggagtattgcttgagcccaggaggttgaggctgcaatgagctgtgacttcaccactgcattccagcctggtgacagagtgagaccctgtctcaaaaataaaaataagctgggtgcggtggatcacatctctaatcccagcactttgggaggctgaggcgggcaggtcacttgaggtcaggagtttgagacgagtctggccaacatgatgaaaccctgtctctactaaaaatacaaaattagccaggcgtggtggtgcacaccataatcccagctactcagaggctgaggcaggagaaatgcttgaacctgggaggctgagattgcaccactgcactccaggctgggcaacagagtgagaataaataaataaataaataaataaacaaacaaaaataaagatatcataatgaactcatggtttttaatatataaaaacataggaaaacagatgtgaatgtgtgcgcacgtgtgtgtgtgtacacacgcatctgtaataacccacaaatattccttagctctgtgtcctaagagtgtccaagagcagcaacaccccaacagcaatgagcacatcaaaggccaagatttactctgaaaggaatcagggctccttagagaattgggtgaagcaggcagaggcagaacagaatatgagcctggttgggcacagtggctcacacacataatcccagcattttgggaggccaggagtttgagaccagcctgggcaacatgacaaaaccctctctctacaaaaaatacaaaaattagctgggcaacgtggctcgtgcctgtagtcccagctacttgggaggatggggtgtgaggatcacccacccaggaggctgaagtgagccaagattatgtcactgccctccagcctgggtgacagagtgagaccctgtctccaaaaaaaaaaaaaaaaggccaggtgtgatggctcacgcctgtaatcccagcactttgggaggcagacaggcaggcggatcacctgaggtcaggagttcaagaccagcctggccaacatggtgaaaccccatctttaataaaaaatacaaaaaattagctgggtgtggtggcaggcgcctgtaatcccggctactcagaggctgaggcaggagaattgcttgaacctggaaggcggagattgcagtgagccaagatcgtgccattgcactccagcctgggcaataagagtgaaactccatctccaaaaaataaaaataaaaataaatttacactggggagggttagggacatcatgtcctcatagcatttaggcgaaacttaaatgtagatttaaacttgaatttctcctttagtcaccagatctcttctgaaggctgggcaccatgcccacagccttacatatatgaattcacacagccctcaacagtcctcagtaaccatgagctaagtattattattgccccacaaatcagaggaggaccaggaacagagaaaggttcagccaaggaccagggtcatgcagccagaggtggaggcagaattcagaccctcttgctgttctcaactactatatatgtcaagtacacatcaatcttgcaccaaaacagtgttcagaaagaagcacacttttgtacaacatatacacacactttccacaagcctcagcaaatatgaagtgctatgctccaaagtgacacacaaaattcaaataattgacctcaagagaccaactcactctaagaaatcaagtgacacgttgtgcagatgacccttggtttaaatatcttcatcttatttggtggccccacttataagctactttcaaattgttattaaccttgaccaagtgatcaaggtcaatggtagcagtgacaggacatattgacagcatgttttccctgacacaatgtgctgaggacacacacattgcctctgtgggactctggccacagatgcacaacttcagtccaatctagaggaaacatcagacaaaccgcactgagggatgttctacaaaatgactgagcgcttcttaaaatggtcagcgtcattcatggatgacaaggtcacagatcacaggagaccaaagagacatgatgactaaatacaacgtgggattcagggcagaaaagggcattagggcaaaaactggggaactccaaatgaggtctgtagttcagttaaagatcattgtactcagcgtaatttcctggtttccatatttgtactatggctctgaaggtgttgacgagacaggaagcccggagaaggagatacgagaactctctgtactattttttcaacttttctttttcttttctttcctttttttttttttttttgagacggagtcttactcttcttgcccaggctggagtgcaatggcgcgatctcggctcactgcaacctccacctcctgggttcaagtgattctcctgcctcagcctcccaagtagctgggattacaggcatgtgccaccatgcctggctaattttgtatttttagtagagatgggggtttcaccatcttggccaggctggtcttgaacacctgacctcgtgatccacctgcctcggcctcccaaagtactgggactacaggtatgagccactgtgcccagccgacaaaactgttcttattcaatttccctaagtctgtcatttttcctttttctatatgactgaatgctaagcacctcttaggtcttcgacctagaatgcagctgcttgttactgatttgcaacagtatttctcagttataaactacaaaataaatcagtgtgcatactggaaaccagggcaatgataaggcagaaagaaaacatcctagccgtcttctgcgagacagaagggatgagcaaaacggcccaccatgcacataagggctgagacaagatcagaggtgtgctgccgcagctctagtcacacacaggaagtgcctttttttttttttttttttttgagacagaatttcactcttgttgcccaggctggagtgcaatggcgtgatcttggctcaccgcacactcttgttgcccaggctggagtgcaatggcgcgatcttggctcaccgcaacctccacctcccaggttcaagcgattctcctaccttagccccccgagtagctgggattaccggcatgcgtcaccacgcctggctaatttttgtatttttaatagagacagggtttctccatgttggtcaggctggtctggaatccagcctcaggtgatctgcccgcctccgcctcccaatgtgctgggattacaggcatgagccaccacgctcggccagaaagtgtcttctaaacagcctacctgtcttttccttgatctcacagagcacgctgaacagagcaggcttcatccgatggcaattcagagcatgctttctgaaagggaggtgacagaggagggtgtgagaaaagaatagtcatcatcttgtccccaagagtaaagatcttccatactgagaaatcaaaccaaacgagatctgccactctgactgtagataagtcgccttatgaaaatgcagtacaatcatatttcatgtgaatttgatttgcacaaaatcaatataaaggccagccgtggtggctcacgcctgtaatcccagcactttgggaggtcgaggcaggtggatcacttgaggtcaggagtttgagaccagcctggccagcatggtgaaaccctatctctattaaaaatacaaaacttggccaggcacagtggctcatgcctataatcccagaactttgggaggccaaggcaggcggattgcctgaggtcaggagttcgagaccagcctggccagcatggtgaaaccctgtctctactaaaaatacaaaaattagttgggcatggtggtgcccacctgtaatcccagttactcaggaggctgaggcaggagaattgcttagacccgggaggcagaggttgcagtgagccgagatcaggccactgcactccagcctaagtgacagagtgagactccatctcaaaaaaaaaaaaaaaaaaaattcgccaggaacagtgtcatgcacctgtaatcccagctactcaggtgggtgaggcaggagaaatgcttaaaccttggaggcagaggttgcagtgagccaagattgtgccactgtactccagcccaggcaatagagtgagactctgtctcaataataataataataataatgtaaagcaatatacaaatattcaaaacatttcccactatatgcaaaagtttaaacaatgcaaataactcatcaaaaactatggtaaggcattagtggctcatgtctgtaatctcaacgctttgggaggccaaggcaggaggaccacttgagcccagaaatttaagatcggcctgggcaacatggtgagacccattctcttcaaaaatttaaaaattagctgggcatggtggtatgcctgtagtcccaatccctcaggaggctgagacaggaggatggcttgagaccatgagttagaggctgtagtgagctatgaacatgccactgtactccagccagcataacagaggccttgtcattaagaaaaaaaaaaaaaggccagaggcagtggctcatgcctgtaatcccagcactttgggcggccgaggcggatggatcgcctgaggtcaggaatttgagaccagcctggccaacatggtgaaaccccgtctctactaaaagtacaaaaaagctgggcgtggtggtgcacacctgtaatcccagctactcgggaggctgacacaggagaattgcttgaaccagggaggcagaggttgcagtgagctgagatcgcaccagtgaactccagcctgggcaacagagagagactccatctcaaaaaaaaaaaaaaaaaagaaagaaaaaaaaagaactatgaaatatcaaggtccaacaacttgaaatctgtgttcacactatggtcctgcagtggtgtatcctggtgcctaagcagaagcaccaatcatcctcttccagtgtcacttggcaggtgtttactgagtacctactatgtgccacacaccattctggcatcagagacacagacaggtaaggtttttacacatgtggcagttaagagggagggagtgagacaccaaaaatacacaccaacaagaaacccatcagccgtggcagttgctctggggcaactggggtcacatgacagtgatggttagaaggctttttggaatttccatgtctctgaggtgacatcaaagctgagatcagaatgagaaggagaaatcaaccaagaaaaggactggagagaggtatggtttaggcagaagaaacagccaagcacaaaggccctgtgagaacacactgggttcagtactggctgtttgagaccaggctgctgagtgttaggggtgagggagagagctacgagaagttagactggcaagtggagattgactctaagggccttgaaagtcatggggacaactctggcttttgcttgcttgggttgggaactatggttggcaggataatggctcccaaaagggtccacatgcttatcctcagaaccctaaatatggtactttacaaaaaatgggaaaaataattctgccaatgtaattaagtttaaggaccttgagatggagagattaacccggattatctgggggggcctactgtcatcacatgacccttaaaggtagagaacctttcccagatgtgggcagagaaagtcatgatgatgtaagggttggagagatactatgttgctggccttgatcatggaggaagggaccatgagcaaggaatgcaggtggcctcaacaggctggaaaaggcaaggaaccagcccatgggctcactgggcaacaccttgattttagcccactgtgcccatgtgggctttctgacctaccgaaatgtaaaatcggtggctcatgcctgtaattctagcattttgggaggccgaggcaggcagatcgctggagctcaggagtttgagaccagcctgggcaacatggcgagacaatgagctgggacaagaggcacgcaccaacacacctggctaaattctgtatttgttgtagagacagggtctcgttatgttgcccaggctgcgctcagccaagagaagaatttcatggagagaagagtaatctgtgagaaatgctgctgagagatcaagcagaataagaacccagaagagaatctgaggctgggcacggtagctcacgcctgtaatctcagcactatgggaggctgaggtgggaggaccagtctaggcaacatagcaagaacctgtctctaataaataaataaataaatgaataaagagaattcggatttagcaacatgaaggtcataggtgactcagcggagagggaacaaggttgggagagaatgtggaggtgaggaggaagcggaagcagcaatcacaaagtctttgatgtttatcataagggagatcaaacaaacataacaggtgctaaaagacagggtgtgtgttaatcatgttttttttctttttctttttgagacagggtcttactctgttgcccaggctggactgcagtggccatgctgtgcccgaactcaagcaatcctcccgcctcagctcctgagtagctgggactacgggtggtgctaccatgcctggctaatttttaaaaaatgtttttgcagagcttaagtctcactatattgcccaggctgttcttgaactcctagactcaagagatccccccgccttggcccctcaaagtattgggattataggcatgagcctggactattaattatgttttttttttatcttgctttgacattgtggggcttggagtgactgcccttcccagggctagcttattactacagacagcaaacaacttgccaaagaacatgccattcatatgcaaatcaaccaatcaaaagcccacattcccaatcatcttcttcatttaatgctcacacacaaagccaataatttcccagccctaaatcaccccagggccaggtactgaccaactagagaccactcctctagcacagagcctgccaaaattatttaaactatctaacctaagcttgctcaaacttgcctgccatgccatgccatgcccattccttcctgaggaaatcactataaaagttctgggccgtgctttccctctctccactgtcgcccactgacccaggtgcttccccatgtggccctgcctggcatggtgtgccccctcctctggagctgtaagtaataaacttccctttcaacagggcagttgtctccatgtgtgtcatcttaccatacctgattaaaacaaatcccgggtacaaagcaaggccaaagggtaagtcaaaggggttttttttctttttttcttttttttctttttgagacagagtcttactctattgctcaggctggagtgcagtggtgcaatcatggctcactgcaacctccacctcatgggttcaggtgattctcctgcggcctccagagtagctggcattacaggtgcccaccactacacacagctaatttttgtatttttagtagagatggggttttggcatgttggtcagcctcagcctcccaaagtgccaggcttataggcatgagccacggtgcccagcctgttgtctttgactgttcttaaagataggaggtactagcacatgtttatatgccaaaaagccagtctagagagagaatttgatgatgcaaggatagagtaaatggccaggcgcagtggctcacgcctgtaatcccagtactttgggagactgatgtgggcagatcacttgaagtcaggagttcgagaccagcctggccaacatagtgagacaatgtctctgctaaaaatacaaaaattagccgggcatgatggcatgtgcctgtaatcccagctactcaggaggatgaggcaggataatttaattgcttgaacccagggggtggaggttgcagtgagccgagaacacgccactgcatcccagcgagcgagactccatctcaaaaaaaaaaaaaaaaaagaatagggtagctggtatgtgcatgtagcagaacttctgtgaacaactttgatgagtactatgctattaacatttactattatgatgattttaaatcctataactctgtcatccaagcgtccattattaaaagatccattattaaaagccacagctgaataatgtatctgaaaatcaataacttcacaacagaaatcagatttgattaacaccatgagaggttgggcatggtggctcatgcctgtaatcccagcactttgggaggctgagatggggggatcacttgaggtcaggagtttgagaccagcctggccaacatggcaaaatcctgtctctcctaaaaatgccaaaaatttgatgggcatggtggtgtacacctgtaatcccaactacttgctgaggcacaagaattacataaattcaggaggtggaggttgcagcgagacaagatcacatcactgcactcccgtctgggcaacagagcgagattccatctcaaaaaaaaaaaaggaatacaactggggtgcagaactaagatctttgtctctgaacttcaaatataaaatgtttgtgggggatgagatgacatatgaacttcccaaaatctaacctgaacattagtctttctttatttttaatttttatttttgagatggagtctcgctctgtcacccaggctggagtgcagtagcgcgatcttggcttactgcaacctccacctcccaggttcaagtgattctcctgcctcagcctcctgagtagctggaactataggcgcgtgccaccacactcagctaattttttatgtttttagtatagacagggtttcatggtattagccaggatggtctcgatctcctgacctcatgatccacttgcctcggcctcccaaagtgctgggatcacaggtgtgagccaccatgcccggccatgttagtctttcttataaggtatacagtcattgatcacacgagatattcagcttaaaatattaaacattttctttccatagaagtggtattaacattaatttaaatggactctgattatagctcatcttctggaaatttaactttttctctttaaaaaaaatatattttaatataaaaatagaagaaacctggggaacatggtgaaaccccagctctataagaaatacaaaaaactgtcagacacagtggctcacgcctggaatcccagcactttgagaagccaaggcaggtggatcacgaggccaaaagatagagaccatcctggccaacgtggtgaaaccccgtctctactaaaaatacaaaattcagctgggcatggtggcgcgcacctgtagtcccagctactcaggaggctgaggcaggagaatcacttgagcctgggaggtggaggctacagtgagctgagattgcgccacagcactccagcctggtgacagaacaagactctgtctcaaaataataataataataataataataataataacaataataataataatacaaaaagtaaattatctgggtttggtggcacatgcctgtagtcccagctactagggaggctgaggtgggaggatcgcttgaactcaggagatcaaggctgcagtgagctgtgatcacaccactgtactccagcctgggcgacagagtgagaccctgtctcataaataaataaataaataaataaaacagagacgggttctccctatgttgtccagactggtctcaaactcttgggctcaagtaatcctcccactttggcctcacaaagtgttaggattacaggcgtgagccttgtttctggcctggaaacttaattttaacaataagaggaaagaaaatgaagttggctcttctgcttctgtaaaggctctaggatttttttttttttttttttttttaccagttttctccttataaaatattttactttagatacagtagaaagcactttttaatgcatacaaagtaatttcatagtttctgtggcttactatgaaaagaaaacaagttcccaagctttgagcatgtctttgagctagcagtgatcaagcagctgctgcaaatcagtgaggaaaaggggactgactagtgagaccttccccaaggggatgaaatcacttacttggcagacacaccctaaggtaacccccagtgagtcatgtccttatataatcctttttccttgagttcaggaagtacctgtgacttgcaatgtgccaaaggtgatggtatcatctctgccatggttatgttgttatctaagactccaccttagatgactagagagtcacccactggcaccagctgccatgtcatgacagctggtggcaggaactgcaggcagcctctaaagctgagagcagcctcaactgacagccaggaagaaagcagggacctttgtgcttcaactgcaggaagtgaattcttccatcaaccatgcgacactgggagagaaccccatgctctggataggaacatagcccagccaacaccttgactgcagccctgtgagaccctaagcagaggacctagctaagctgtgcccagaatcctgacccaaggaaactgtgagataataaatatctgctgttttaagctgctaggcttgcggtgatttcttataaagcaatagagagttgataatgagatagactggaagccagagaatggggaccgttgggagaaaaatggggttggtgctggtatgtctaacaagtatatgacacgttatggctgggtgccgtggctcatgcccgtaatcccagcactttgggaggctgaagcgggcggatcacctgaggtcaggagttcaaaaccagcctggccaccagcctggccatcatggtgaaaccccgtctgtactaaaaatacaaaaattagccaggcatggtggcacatgcttgtaattccagctacctgggaggctgaggcatgacaatcacttgaaaccaggaggtgaaggttgcagtgagccaagatcgcgccactgaactccaggctgggtgacacagcaagactctgtctcaaaacaaacaaacaaacaaaaaacacaagtatatgacatattctaccaaatccacatatctgaatttttttgtttgtttttgagacagagtcttgctctgttgcccaggctggaatgcagtggcatgatctcagctcactgcaacctctgtctcctaggttcaagcgattcttgtgcctcagcctcccaagtagctgggattacaggtatacgccaccactcctggctaatttttatatttttagtaaaggcggggtttcatcacgttggccagactggtctagaactcctgacttcaagtgatccacccacctcggcctcccaaagtgctgggattataggcgtcagccactgcgcctggccacatatctgagttttttaaaatgctaatgtttatgagaaaaattcgaaaaaaaggaagaacagtaaatcttttaaattgacttccaaggagtcttctaacctaaacaaaaacaaaaaaagcccaaaaccaaaattctgaatatcatttttaaaccaatattcaaaatctatagcaaaacaattgagagtcatatagaaaatgccagaaagtgaaagcatagagctttatcccccttcaacctcatttattcaatatttatgggacaaacatttattgtggaagtaccatatgctggtccttgtataagggctaaggaacatgaaaatgaataaaaacataatccacattctggtatctaccaacagtatgttttagctgataattttagctataatttactttcccaaattatagaacaatctgttttcctcatcaaggtatcattttaaattacttgggaatttcatttaaagatatattcagagatttcagtccctatggaatagaatactacttgaaaaagtcttcctgaaagcaacaatgattctaacaccttaaccaaggatagatcgattatccttgattattctcagttctagaaggattattttagctgacaaaagcagtcagcaatattatacatctcctggagacaaacctaggtacaaacaaaaatttagaacttatgttccctgctcttaagaagtaaaactgcaggccgggcgcggtggctcacgcctgtaatcccagcactttgggaagccgaggcgggcagatcacttgaggtcaggagattgaggccagcctgaccaatatggtgaaacctcgtctctaccaaaaatgcaaaaatgagccaggctgtggtgaccagcgcctgtaatcccagctactcaggaggctatgacaggagaatcgcttgagcctgggaggcggaggttgtggtgagccaagatcgtgccactgcactccagtctaggcaagtgagaccctgtctcaaaaaaaaaaaaaaggaaagaaaactgaactcccacctgggcaacagagtgagactccgtctcaaaaacaaaacaaaacaaaacagaacaaaacaaaccaggacaaataccttagaaaggtcagaatactttgcaaagtacttacactgtacaagtctggaacaaaccgcgtgctcactccttacctggcaaggagttcaaggccatgcttggtcggacagcagctgaggcaggcagtcacccccgagtctcccttccaaggtcacgcccaccactcatgcccgatgggaccacaatgcatgccttcatgctccacgcctgccttgcatgcatgcttgcaccaagcctacaatgccgcatccactttctttgcctaggcaaagcctcaagtccagatcttggccatctcctcaaggctccttgtcccccgcctgacttcacctagactccagagtcatgcactctgattgcccatgctctacaagctctagtcttgctgaagggctaactcctcattgccctctctggtccccgtgtcaccgcactctccaatgtctgcctctccaaataatgaatctcctttcagaactcactgctgcattcccaagcccagcaccagacctggcacaaaatacatgtttattgagtagatgacatttaatttgcgagaatgtacttttaaaagtgtcctgtaaagcccgagcctgactgtctgatctcccacggcacccaatcagctgggctcctctgagcaggaagcgatgtcagatttaagtgagttttgtaggatccctgggaaaagcagagacaggtggcaggcagtacagcctcagagttcaatagagcatgcccaaatctccatccaactaccctccagttatctggccacttgattccttatctagaaacacagtgaagagccaggcgcagtagctcacacctgtaatcccagcactttgggaggctgaggcgggtggatcacctgaggtcaggagttggagaccagcctgaccaacatggagaaaccccgtctctactaaaaatacaaaattagccaggcgtggtggtgcatgcctgtaatcccagctacttgggaggctgaggcaggagaatcgcttgaacccgggaggcggaagttgtggtgagccgaaatcgcgccattgcactccagcctgggcaacaagagcaaaaatccatatgaaaaaaaaaaaaaaaaaagagccaggcgcagtgattcacgcctgtaatcccagcactttggcaggccgaggagggcagatcacgagctcaggagatcgagaccatcctggctcacacggtgaaacccggtctctactaaaaatacaaaaaaattagccgggcgtggtggcgggtgcctgtattcccagctactcgggaggctgaggcaggagaatggcgtgaacccggggggcggagcttgcagtgagccgagattgcgccaccacactccagcctgggcgacacagcgagactccgtctcaaaaaaactaaagaaagaaagaaaaacaaacagtgaaaaaccacccacttcctagggttctggggaggggtaaatgagggaaatccttattgtcatcatcatcaaccactgtgttctgatagaggcactcggtagctgtcatttaaatgagtgagtggtacttgctcctttgtgaaattctacacatggctttacttttcattaataaagctatttcaaaggggattttgccaaaagacttttagatagcttcagggaattgttttaaaactaacacaatttgccaggcacggtggctcacgtctgtaatcccaccactttgggaggctgagacgggcggatcacctgaggttgggagttcgagaccagcctgaacaacatggagaaacctcgtctctactgaaaatacaaaattagctgggtgtggtggcacgtgcctggaatcccagctactcggaaggctgaggcaggagaattgtttgaacccgggaggtggaggttgcggtgagcagagattgtgccattgcactccagcctgggtaacaagagtgaaactccatctcgaaaacaataaaaaatttaaaaaacttacaaaaaaataaaaacaacacaattcaagctgggcaaagtggctcacacctgtaatctcagcactttggggaatccgaggcgggataatcatttgaggtcaggagttcaagaccagcctgcccaacatggtgaaacctcgtttcaactaaaaatatgaaaattagccgggtgtggtggctggcgcatgcatgtaatcctagctaatcaggaggctgaggcatgagaatcacttgaacttgggaggtggaggttgcagtgagccgagattacgccactgcactccagcctgggtgatagagcaagactctgtgtcaaacaacaaaaaccaacacaattcaactcttaggaaaagtacaccaaagacagcaagactcctctggcactagaccaagtcaagctaagcctgcaagcaagctaagaagaaagactacaaggcacgaagtcaactggcatctaattaatctctttagggatactgaaaaagaaaattttaaatatgaaatcctacttcccaggtttggactgatagatcctctcatgctaatgctatctggctctgggaaattccacatcataaattccccctagaacccttgcattctttgaatgggtgtgcggaaggctgaatgctcactgacatgctttataactatgtatgaatataaggtcagaacatacataagtatacatactttataagtatatgtgttctgaccttatattcactattgcaaaagtaccaagcctaggggaacacatttcaggtatcagttcacaccttgcctcttcagtaagtttaaaggatagtcaaaatcacttcattatctccccttcataataggaatttaatccatatctaggcaaagtcaatctgcagaaatattggagggactaagaaagttatgcaaatctctactagttgaggtcataatagtaaaaatcaaattaaaaagagaaggccgggcatggtggctcacacctgtaatcccagcactttgggaggccgaggcgggcagatcatgaggtcaggagttcaagaccagcctggccaagatggtgaaaccccgtctctactaaaaatacaaaaaatagcctggtgcaatggcaggtgcctgtaatcccagctacttgggaggctgaggcaggagaatcacttgaacccagggggcagaggttgcagtgagccgagatcatgccactgcattccagcctgggtgacagggtgagattctgtctcaaaaaaaaaaaaaaaaaaagaaagaaaagttcagagatatgttttcttcctaagaaaacctatgcaggcattgctgggttgcctaaaaccaacttccaaatacatttttggttttaggtatgccatctcacacaccacactgcttgctcctaaaacattataacagtgagcatttagaatgggtgggatggctcatgactgtagtcccagcattttgggaggctgaggcaggaggacagcttgagcccaggagttcaaaaccagcctgggcaacatagtgagactctgtatctacaaaaaaatgttaaggccaggcacagtggctcatgcctgtaatccctgcactttgggaggctgaggcaggcagatcacctgaagccaggagttctagaccagcttggccaacatggtgaaactgtgtctctactaaaaatacaaaaattaagccgggcatggtggtgcatacctgtacacacctgtaatcccaactactcgggaggctgaggcagaattgcttgaacccatgagacgagggttgcagtgaactgagatcgcaccactgtatcccagcgagggcaacagagtgagactctgtctcaagaaaaaaacaaaacaaaacaaaaaacccaggtttgaagagagagctatattttccttctgaaaacaaacttacggcaacaaaacatgttcagagggcctcacgactgagatgaaaaattccttcttgctaaacagttgagttcaactgactgctggggtgataaaaggggtgactggcacattgagagtgggcaggatcagaaagattttcaaaagcctcacaggatcagttgatcagaagagacaatctgcttcccagcccaggttggtaatctaccaggctgcagggtttactgtgaggagctgtatttcctccagaggggtggaaatagcccatttgaggatggatgatttttgtctggacttgagtgaactttagggctttgagttcatctaaaggctaggtccaaagaaatgagggagatttgaagcttcaaagtctcgaaataaaagccccgggggtcatcccaattcagaaagaggccagaaaccaggaaccagctacctaacacctgtgttatcaagcatgaataacgccccccaccacaccatttaatttcttttttttttttctctgtcatccaggctggagtgcagtggcacgatctcggctcactgcaacctccgtctccagggttcaatcggttctcctgcctcagcctcctcagtagctgacacatactacaggtgggcatcatcatgcccagctaatttttgtatttttagtagaggtggggtttctccacgttgcacaggctggtctcgaagtcctgagctcaggtgatcctcctgcctcggcctcccaaagtgctgggattacaggcgtgagccactgcacccagcctaatttcttagccttaaaacaaaaagagctatctttgaaaatggtaaagaagtaactggctggcagggcgtggtggtttatgcctgtaatcccagcactttgggaggccgaggtgggaggatcacctgaggtcaggagtttgagagcagcctggccaacatggcaaaaccccgtctctactaaaaaaataccaaaattagccgggcgtggtggcaggcgcctgtaatcttagctactcgggaggctgaggcaggagaatctcttgaacccaggaggcagaagttgcagtgagccaagaacacgccagagcgagactctgtctcaaaaaaaaaaaaaaaaaaaaaaaaaaaagtaactggctgcattccattctaaatctaaagcctgtctagggaaactagaatctcaggagattgctgcaaggaaaatgcagcagccctggggctgtgctgggcctgaggaaggccacatctgagcagagctcaccccttaagcagcaatatcccggtctggaaagtacaaaagtagcttccaggacacacccaaagctctgcctctgcggtgacattcctgggtgtgtcaaaaccatcttccccctttcccaactcctactaatccctctagaatctcctcagtgtcatgaaactactgaatgcaaggtgctaggcattgatcctggctctgggaacacaaagtataataaagccactgctctccgactagcctaacagacatcacggaaggcaccctctcctggcacagctcttctgtgctaggaattacctctacacagcacattcctgttataacaattatttacaagttggtctcccacacaccctacttctcagtgggctccaagaaggcagagaacatcttagccatcttggtttctctagcacctggtacaatgctccaaaaagaataaaaacactggttcacgtctgtcatcccagcactctgggaggccaagatgggtgaatcacttgagctcaggagttcaagaccagcctggacaacatggtgaaaccccatctccacaaaaaatacaaaaattagccagccattcattggtggtttgaggctgtagtcccagctacttgggagactgaggctggagaatcacttgaacctgggaagcagaggttgtagtgagttgagatcataccacagcactccagcctgggtgacagaataagaccctgtctcaaaaacaaacaaacaaacatggcccggcgcagtggctcacgcctgtaatcccaacactttgagaggccaaggcgggtagatcatctgaggtcgggagtttgagaccagcctggccaacatggtgaaaccccatctctattaaaaatacaaaaaactagccaggtgtggtggtgcacacctgtaatcccagctacttgggaaactgagatgggagaatcacttgaacccgggaggcggaggttgctcactagccgagatcgcgccactgcactccagcctgatcgcgccactgcactccagcctggacaacagagtatgagactccgtctcaaaaaaacccaaaccaaaccaaaaaacagccaaacaaacaaacaaaaacaaacaaacaaacaaaaaaccacaatgaaaacagttggaggagccaggctcagtggctcatgtttgaaatcctcgacctttggaaggctgaggcgggaggatttcttaactcaggagtttgagaccagcctggccaacatagggagacctaaaaaaatagaaagattagtccaggtgtggtggctcagggctgtaatcccagcactttgggaggccgaggtgggtggatcatttgaggtcaggagttcaacaccagcctagccaatacggtgaaaccctgtctctactaaaaatacaaaaaaaaattagccaggcggtagtggcacacgcctgtaatcccagctactcaggaggctgaggcaggagaattgcttgagcctgggaggcagaggttgcagtgagctgagactgcaccactgcactccagtctgggtgacagagtgagaccctgtctccaaaaaaaaaaaaaaaaaaaaaaaaaagaaagattagccaggcgtggtggcacaggcctgtggtcctagctactcaagaagctgaggtgtgaagattgcttgggcccagaaggttgaggctgcagtgagtcatgatgacactactgcactctagcctgggtgacagagcgcggccttatataaaaaaaaaaaagccaaagaaatagttgtatggtgacaaggactctaatttctcaaacagagcatctgaaactacaaaaagtgtcaacattccctgagaagcaaaggaaagaaagtttgaagaacaaatttactttctctccccaaaccatgaacttgagagcaggaagaacttgagagctatgccagaacccagttcagtacccagatattgtaaaggtccgataaatatcggccaaatttgttaaaaattcattgaagaacaggccaggcacagtagttcacgcctgtaatcccagcactttgggaggctgaggtaggcagatcacctaaggtcaggaatttgtgaccagcctggccaacacggtgaaaccccatctctactaaaaatacaaaactagccacgcatggggcgtatgcctgtagtcccggctactcaggaagctgaggcaggagaatcgcttgaacccgggaggcagaggttgcagtgagccgagatagcgccactgcactccagcctgggcaacagagtgagagtccgtcacacacacacacacacaattcattgaagaacaaatgcatgcattatccacctttttatctgcctcttccttcctaggactgctgtttacctggctttgtaacccctccccactacagggctctagtgggtacacagtccacaccaccagaccctagtcccatacccagagaccgtccctcaccttacaacagtccccattcaacaaggcctcatcctccaaaaggacttcagtcctttcctttccttttctgtaataatcactgcaggacccagacacagtgggctgccttgtgaagcagattctacggatcctggctggctgacaagtggtgagtggaggtaaacgggatgggaggtctaaaaactcctttatttttccccattgcaactggaataaatagtccgaactccctattgattgttatccagatgacaaaaacaaaactatttttttatggagacagagtctcactctgtcgcccaggttggaatgcagtggcgcttgaacccaggcacctcctggattcaagtgtttctcctgcctcagcctcccaagtagctgggaccatagacatgcaccaccacgcccagctaattttcgtatttttagtagagatggggttttgccatgttggccaggctggtctcgaactcttgacctcaggtgatctgcccaccttggcctcccaaagtgcagggattacaggtgtcagccactgtgcctggctgaacaaacaaaactctttactgagattcgtaggccccatgtaattgggttccagtctccctttattattattattattttttgttcagacggaatctcgctctgtcgcccaggctggagtgcagtggtgtgatctcggctcactgcagcctccgcctcccaggttccagtgattctcctgcctcagcctcccaagtagttgggattataggtgtgcaccactacacccagctaatttttgtatttttggtagagactgggtttcaccatgttggccaggctggtattgaactcctgacctcgtgattcacctgccttggcctcccaaagtgctgggattacaggcgtgagccaccgcacctggccccagccttcctttaaactcaactctttccctccctggctaggaactttctcttcccagccagactccgctttttacatcctctttcccacctcagggcctctgaaggtgctgtcctctccaaagatgttcttctccacctggcttcctatagcatgcaacccctatccctacagcttttattgccatttattttatttttttcttttctcagattggtacaggatggtctcactatgttgcccaggctggtctcaaactgctggactcaagtgatcctcccactgggaggcagctgggattacctacccatgctaccatgcctggcttatacttttttgcttttgtttgagacagggtctagctctgtcacccaggctggagtgcaatggcttgattcggctcactgcagcctcagcctcctaagtagctgggactacaggcttgcatcatcacacctaactaattttttaattttatttttagtagagacgaggtcttactacattgtccaggttggtctcgaactcctgagctcaagcaatcctcctgcctcagcctcctaaagtgctgtgattagagatgtgagccactccacccagtccttattttttgctatttacattccctcccctaaatcatgtactcgagagcagggactatgtcagcacccggttccctatccagttattgtaaggattcaataaaaatttgctgaattcattaaaaagaaaataggtcttccatctccacccactcctctactaacccttttcccaaaagttctcgatggttcccacaccaagttaccccagttcagttcttcagtctcctgcagacattcctgagtcccattcccagccactcactctccatcatctgccctggaaacttcccacccacaggccgggctcggtggctcgcgcctgtaatcccagcacttagggaggccgagacggaatgagtgcttgaacccaggagtttaagcaactatagcgagacccctgtctctacaaaatatacaaaaaaatcagccgggcgtggttgcacgtgcgcctgtggtcccagctactcgggaggctgaggcaggagaatcaactgagccggggaggtggatgctgcagtgagccatgatcacgccactgcactccagcctgggcgacagagcaagaccgtgtcaaacaacaacaaaaaaacttccagccgcaggagtcccattaacgtacccatttagtcattcactcgtcaaaagtcccgtacgtgcccatttctcagccctactccctaaacccctaaacccaaccttctcgccccaagatgagctgctgaaaatccttcacgccactgctcggccccataaggcctatccagcccgttccgtttgaaccccatacatcccttcgtcctcgggacccccctccagccctcctcaagcgcccctcgtcagtctggcctccacgccccgtcccctcagcccgccaacctcactgccacgaccctgcgtggcccctgccgagcccgcgggcagcacctggcctgtgcctcgtccaggctctggtcggtgatggccatgatctgctgcaggacgtcgctcgtgtcgaggcgccgcggggcggggggcgatggcgcggggcgcggcggggcggccatgagcggcagggccgggcgggcgctgtgagggtgccgtcgagcctggagcactaccactggcgccgcagccaaccgccgctgcctgagcgccgcgcccgctctcgctcgcgcctaagccacgcccaccgccgctatcgccagccaacccgtgtattgcaccgcctacagacacgccccttcatctccgtcagccaaccggcgccacgcaccgcccccgggactcgccccgaacttccccctctccgggcttggactgggtttggggttgccgaggcaacggcacttctcataagcgccctccttccccttgagagagggcagcgctggctccgctccagccagaggcccccatccctcacatctcgcgcggtgcacgcctccttcagccccactcgcatctcctcagagttcctgctcctcctcagggcccccttctcctcaaagccctcggtcctcagagaccctcactccccagagcaccccaactcttcctccaagccaccccctcctcctcagaaccccacacctcttatagcttgatcgacagcccccattcatttccagaagccccaagccccagacccctgctcagtccccctaatgctccctgcatcctcagccccatcaggtgggccactggggcccctggctcttcctctagagctttccacgccccgttcacctggctaaggcggggcgcaggcgtgcgtggttgatggcaacgaggaggtcagaacgcagcgcttttctccactgcagaaatcaattccagtcacctttcaaggtccagctgaagagtgacctcgcttgtttattcatcttcgcagattacagttctgggcatagaaaatgctaccacgtggttaccgaatgaaggaaggatgtttactgagagactcccctgcagtgtaccccaaatcagagcgaatcctcacatctttgtttctagtccttaggacacagcatcgaaggctcctagtgcacaagaaaaggaactgggcggtggctcatgcctgtaatcctagcactttgggcggcagaggcgggaggatcacttgagcacgggagtttgagaccagcttgggcaacatagtgagaccccgtggtggtgcacgcctgtggtcccagctatttgggacttgagaggctgaagtgggaggatcacttgggcctgggaatttgaggctgcagtgagccatgattgcaccactgcactgcagcctggttgacggagaccaggtctcaaaaaaaaaaaaaaaaaaaaaaagtaatggcctggacatgaatctcttctccaaagtcacagaacctcctggagcctatttgctatgaggacagtctccagatgtgggctcagtaaaaggtcctcagcctgctggctgggagcccttccagggtggggcccacgttctctccattgctgctggggaggaaattcaaacaccatctggtatggctggattggagagcgtcgggagactccaaaggggacggcagggagtgaaaaatgaaagacattgaccgagtgtctggacaatagggaaagctctctgatgaaggaaaccgacacttggctccaatgacagaaagtaatagattgcatgggagccacggagaccagtgcctgttcaaaaggtcacccacaagcacagcactgcccaggaggcctgaacagtagtggccttcaggctgggtgcagtggctgacacctatgatcccaacactttgggagtctgaggtgggagattacttgagcccaggagttcaagaccagtctggggaacatagtgagaccccatctctacaaaaataaaaattaaaaaaatagctaaattagctggtcatggtcccagctacttgggaggctgaggcgggaggataagttgggctcaggaggtcgaggctacagtgagctgtgtttgtgccactgcactccagcctgggtgagagagcaaaacctgcccccaaccccaacaaagtagtatccttcagagaacttggaggggtgggcactgaaagcttcagggaccagcagagacaaaaatttgaagccacttggtggagacgggagatcgacaagaggaaatggtctcgaaggagacccacggggtgcaggttaaaacctggaggagctgatgtgaacagccagctcagagcgcctgagacagagttgccttttttttttttttttttttttagacagaaatcttactctgttgcccaggctggagtgtagtggcgtgaccttggctcactgcaacctccacctcctgggttcaagcacttctcctgccttagcctcctcctgagtagcttacaggcacccaccaccacgcccggctaatttttgcatttttagtagaaatgaggtttcaccatgttggccaggctagtttcaaacttctgacctcaggtgatctgcctgcctcggccgcccaaagtgctgggattacaggtatgagccacctcacccgtcccactgttgccatttggaggtcatcaggggtctctactgcatagaaattagttggcagccttggcactcaaagtgctcggccagggccatttaatatagaaggacctgggagttttgggttctttgacaatgcatatttcagtggtttaagaatttggcacaggtggctgggcatggcggctcacatctctgagtgacctgggttcaaattctagctgttattcagcatgggattcaaaagtagggacataaccccacctcctcactggtgaggtgggagcagagaatgacatcctggcacacactgtgccttggagggggcctccctgagcatctcagagggggctcatgatggatctggcactcatgggttgggtgctgtggggtgaggtagggaaagcccagctgagcttgggaccaaccctgggcttcgtgggaatctgaagtccctttcctaggggcctctctggtccctcggggcctgtatgtgccatctccaagctgtgtttaccatgggccagatcacaacctgtctgaatcagtgttctcacataaaaatcagaaagactgatcccagcactttgggaggccaaagcaggcggatcatgaggtcaggagttcaagaccagcctggccaatatggtgaaatcccatctctattaaaatacaaaaaattagccagacatggtggtgcatgcctgtagtcccagctacttgggaggctgaggcagaagaatcgcttgaacctggagggggcggaggttgcagtgagctgagatcatgtgagactctgtctcaaaaaaaaaaaaaaaaaaaaaaggccaggcatggcggctcacgcctatagtcccagcactttgagaggctgaggcgggcggctcacctgaggtcaggagttcgagaccagcctggccaacatggtgaaaccccatctctactaaaaataaaaaatttagctgggtgtggtggcatatccctgtaatcccagctacccgggaggctgatgcaggagaatcacttgaacctgggaggcagaggttgcagtgagctgagatcacgtcattgcagtccagcctgggaaacagagcaagactccgtctcaaaaaaaaaaaaaaaaaaaagcccagcacagtggctcatgcctgtaatcccagcactttgagaggccgaggcgggtggatcacaaggtcgggagttcaagataagcctggccaagatggtgaaaccccatctctaacaaaaatacaaaaattagccgggcacggtggcaggtgcctgtaatcgcaactacttgggaggctgaggcaggagaatcgcttgaaacccgggggcggaggttgcagcgagccgagattgcaccactacactccagcctggaggacagagtgacactccatcacaaaaaaataaaaaatttaaaaaaaaaagcacctaaagtgtttaccagtatgccaggcacatcagaagagcttgagaaatggtcatgctcaaatcctgcatcccactacctgaaccccacaacctgtggctggaagtatgaatacaggtggtggggaatgggatagaaacggctgggcacgtgaccttgaaccatcagggctcaaacaaaagggcagtggggagggagggggctcatagggtccagacactactctgagctgcagagaaagacagggagacaggcagtgagatggaggcagagcaacagatgggggaaacaaagaacagaagcagagagaaacagattcaagaccccagtaagagagaggggccaggcgtggtggctcatgcctataatcccagcactttgggaggccaaggtgggtaggtggatcgcttgaggtcaagagttcgagaccagcctgactaacatggtgggaccccatctctactaaaaatataaagattagtcaggcacgcggtagctcacacctgtaatcccagtactttgggaagctgaggtgggtggatcattcaaggtcaggagtttgagacgagcctggccaacattggtgaaacctcatctctactataatacaaaaattagccgagtgtagtggcagatgcctataacccagctattcgggaagctgaggcaggagaatcgcttgaacccaggaggcagaagttgcagtaacctgagatcaagccactgcactccagcctgggtgacagagcgagactccctctcaaagataaacaaacaaataaataaataataaaaataaaaatacagagattagctggacgtggtggcacgcgcctgtaatcccagcttctcctgaggcacaagaatctggaacctgggaggtagaagttgcagcgagctgagattgtgctactgctctccagcctgggctacaaagtgagactctgtctaaaaaaaaaaaaaaaaaaaaagagagagatggaataacagccagccagactgaagaagagcgagcacagggccaaggagataccatgttgaaagatcctttctggacttgggccaaggtagacaattccgggacacagggacagaaacactgaattgataacaacaaatgttttggagacctcagagtgtaaagaaaggtttactccttgtatcatcccctccccgtggactgcttcaattctatcggggacaggccagtccctggaggctgcaaggagccacaaacctttcccagctcacactctgcacccctcagtctctgctgctaaagaatcagactcaggtagatggggtgtccacagtctgtcctcattacccagtcataccgggtagcatggcccgagagagcccttatctctccccaccttaaaaccctcagcatcacacagcaggaaccagtccacagggcttaccaaggatacgcagtgaaaacagaataatgtctgttacaaaccccctaaacctgagatggctgaagagccagattcctgcaccccatctgactcccccaggcagtgggagatgacccaaagcccccattccctgggcagagtggtgtgcctggggaggcctggcagtggtgctgtgccatgccagaccttgtcctgccagtcagtcagtcctgttggttgggttgagccaggagcacccacaagtcatcaggggctgtggatttgttgcttgccgcgtaccgctgaagttcaaggtagctaaagggtggagtccatcagtgggtggccgttctcgggaagcatgatgcgagtgctggcacctccctgggcagaggatgtatagtggacagactcgcgggtggactggcggaggcacgcgcagcagagaaggcggcggaaggtgcggcgcatctcagcatctcggcaagagtacacagcagcattgaccagggagttggcctcggccaacagtaggaagtacttttctacagccaggacattgcaggactcacagcctaaaccatccaggagcagtaccacctggcctggtgtccagcagaccacgaacgcccctgtgggacagaggcggaagtgagcagggcaagctgtcagaggcccggcacctacagctctcagtttggggttggagtggtctccagagctcgagcaatagtggtgaagtttgcagtgcaagagctgcttgtttccctgattctgcagtgtgacaggaaggcctgctaagatgggacatctatgctaattggtacacagtggccaaggcactggacattttgtgtgtgtgtgtgtgtgtgtgtgtgtgtgtgtgtgtgtgtgtgagatggagtctcgctctgtcgccaggctagagtgcagtggtacaatcttggcttgctgcaacctctgcctcccaggttcaagcaattcccccacctcagcctcccaagtagctgggactacaggtgtgtgccaccatgcccggctatatttttttttttttgtattttagtagagatggggtttcaccatgttggccaggatggtctcgatctcctgacctcgtgatccgcccgcctcagcctcccgaagtgttgggattacaggcatgagccactgcgcctggcctgtgtgtttttttttgagacagggtctccttctgtcacctaggctggagtgcagtggcacgatcacacctcactgaagcggcacgatcacacctcactgcagcatttgacaggctgaggcaggacaatcacttgaggccaggagtttaagaccagcctaggcaatatagtgagacctcgtttctacaaaaaataaaaaattagccaggtatggtggcacatgcctgtagtcccagctactcaggaaactgaggcgggaggatcacctgagcccggaaggttgaggctgcagtgagctatgatggagccattgtaatccagcctaggcaagagtaagatcctgtatcttaaaaacaaaaataaattttgaaatttaaaaatatgggccgggcgtggtggctcatgcttgtaatcccagcactttgggaggccaaggcgggtggatcacgaggtcaagacatcgagaccatcctggccaacatagtgaaacctggtctctactaaaaatagaaaaattagccaggcatagtggcacgcacctgtagtcccagctactcaggaggctgaggcaggagaaccacttgaacctgggaggcagaagttgcagtgagccgagattgcgccactgcactccagcctgggtgacagagcgagactctgtctcaaaaaaaaaaaaaaaaaattaaaaatacatatagattaaaaaacaatttaaaggctttttgttaaaacaggcttagcactgctaaaaactccttttttttttttttttctgagacagagttctggagtttcgctcttgttgcccaggctggagtgcaatggtgtgatctcggctcaccacaacctccgcctcctgggttcaagcaattctcctgcctcaggctcccgagtagctgggattacaggcacacaccaccatacctggctaattttgcatttttagtagagatggggtttctccatgttggtcaggctggtcgtgaactcccaacctcagctgatctgcccgcctcggcctcccaaagtgctgggattacaggcgtgagccactgtgcccggctagcactgctaaaaactcttaaggggttcccatgaaactcaaaataagactcctgtccgtgccccttaaggccttgctgatctctcctcctcacaagcccactttcctctttagaggctctggcctcgtactgccttgaggtttttactttccgtttcctctgcctggaaggctctctgttcctatcctcagcattcaggcctctgctcacatacattatcacctccttggaggacattccccacctaaatcatcccccatcaccctctatcaggtagcttgttttgttcattgcttcgcagtgtcttgtgggagatagggggaagcagggtccctgttgccccctgggggccccacttacccaggatgatgacaacagtcttgaccaggctgagcgtggtctctcggtagcgggggtggcagctgacatgctctgccatgcgctgcactcgccgccgcacgtagaagaaaatgcgggtgtacacagccaccatgagcaggaagacaagcaggctcgacagagcccagacggccaaataggagcggctgagcaggggtgccatgcgtgagcagcggtccagggcacagaggcagtgccaggagtgggcaggcagcagccccaggcccagggcagccacccacacgcccacaatgagcatgaccacgcggccacggggcaggcggctgtgcagctgcacggccatcacactgcggtgccgctccacggcgatggccagcagtgtggccaccgacgcagtgaggcttgtgtccagcaagccctgccgcaggaaccagccctcaagtgaaagtcgggctgtgcggggaccagtgtggaacatgaggaagaggtaggccacgcccgcgaagaggtcagccgcggccagattgccgagcaggtagtagatgggctggtggaagcggcggttggaggcgatggctgctatgaccagcagattggtcagcagcaccagcacgctgacggtcagccccagtgccaccacgaccacatccttgggccgccagtgggagctgagctctttgccactgttgttatagaagaagccgatggtctcgttgtagtagcactggcccatgatgaccatctggggacacaagagatcagtgcatgtggcacttcttggaaggacacagggaggggcggcagctgcagaggagggtcagcgcaggaaggacaagggtctcaaattcagatacctcgaagcaaagtggcagtggtgaggactacggtggcctggaaaaagcaagctccatggggctggggtggaggtggaggagcagctgtttcttacctactaataagacctgtgtgcaagacatcacccaagtcaataggtttttgaaccagaagtgaaacaaaacccatctatggtcgaatcccagcccacctgccgccaatgtgtgacccggtttgggttgtggggagaggagggttagggaaagacaaaggggtgtgagctgcgggaagagatgagggaggatcactttggtgccggagtcagtgtagggagcagagacccgggagcgtgtgcacacaagggtgaggtcacttgctagaaccctgcgagggggcggtgccgaggcgtggaggtgatcggagtggacagagaggcggccccagaagttagtcggcgggatttgggcgcgagtgcttcccaagcgggcggggcaataggctgttccgggtgggacggaggacactggcggtctccgggacaaagacagcggttggggaagggatggatggccgggcctccaggcgtctccagactggggaaggggtagggggttaagggatcagagggcggcgtcctggccccgcaggcacgtgccgcgcccttcccccgggcccaggcccgcacccgcccgcctcccgtccgtgcaggcctcacctgggcctccagtcacgccgcagacaaggcgggctcgcgggggttcggggcgggctcgaggcccatggcccggcgactgcggcgggagcggtagagcgtccgggtgcgccctgtgcgggttgctgagagggcgcgggaggcggggtctccccggcgccccgcccccaccacctgggggagccctgccccgccccgccacctgggggagccccgcctccacggccgcgtcgggggcggtgtcgcccggaaccgcagcccccctgtttcctccccgcctcgcggcccctcagtcgcccctatttccggcgcgggacccccaccccggtacctgcacacctcatgcgcccgcagtttcgagcctgcggggctgagtcactcggcgacccgaaaattcccgccgtgaccccgcgctgcccgggcggagctccaggtggtcttgggtccgcgcccccgctccggacccccaaccctcccagccccaccccgctctcttcttcgtgtccaatcggccgccgagttacaagccactccctgatccgacttggctcccaccgcccggacccccgcccagcttcggctttgccagctcgcagtatcagcgagccgcggcctcctgtgcgaggcccacctctgcggccccagctgatcatcgggcgcacgctagggttttgcaatcccgcccccgtacccctcaccctgggacagcgctgccccctgcaaagcccggccctgccctgccctgccctgtggcttcctccctcggcctccctgcggcggccccgggctcccacggtccggagcacacagccccattgtcccggttatcggtactttgttatactgtatttgattatgcaggaccggatcggggacgcagagctccgggagggccgggctggcgtgactcagccgggtgctgcgacccagctccaactgcctttacgtaggtgctgcagggtgtttgatgatgcaagaaggaggccttgaggccgggcgcagtggctcacgcctgtaatccctgcattttgggaggccgatgcgggacgatcacgagatcaggagatcgagaccatcctggccaacatgctgaaaccccgtctctactaaaaatacaaaaaaattagccgggcatggtggcaggcgcctgtagtcccagctactcgggaggctgaggcaggagaatcgcttgaacccgggaggtggaggttgcagtgagcggagatcgtgccactgcactccaacctggagacagagcaaaactccgtctcaaaaaaaaaaaaaaaaaaaaaaaaaaaagaggccttgattcccctaatctgtaaaatgggggcaaggagtgctacccatgctggcctctcccctagcagagatgcacccaagggcatataggacacagtttattagaggccatcagacctcaggcaccaccagcatgtggagtctgagctgcccacctcctccaggaaggtcacttcgagtccgtgaaggaggcaggcaggtgtgggggagtgaccacaaccaaagtagcaaaagcacccctgtcccaggtgtcagagactagggtggaccccaaggatctcataacctgcactgaccctgagtattgaccctgagtgacctctgagcccgagtggccctgatgcttggcagtgacctgtgtctagtggggggactctgggacattatccccaaaagggttttaggcctcccctaggtcatgtattaaatagtttttccttataggaaccctctggacctctcccagcattgaactcctggcggggtgtttggccactaggtggtgggaggtagggatatatgggtccgtcttcacaatctgggcctcttccttatttaaggtgccagggtggtcagagatggtcctcggcttcctcaggctggacgtccgggcagcaggtggccctgggcacagcctcgctgtccaatttcgagagtagccgggctgtctcctgggtaatctcaaaatgcttgggcagcggggtgcggcgcagggggctgccctcaggggaggcagctgcagggctgggcccccgcccccgcaaactccctctgggcactgatgtgatgggggtctcctcgcacagcttggaagccaccagggccagactggacagctggtgggttacaggcctcacaccgccccggggatacttcactggctggcggctgaagtggccacgagactgtgtccccaggagtgagtcctctgggccttggctggacactgtgtacggggtgggtggtcagtgcagagcacctccaagttctctgtatatccccccaggagtcatcttttagcaagccaccctggggccagggcacccccagaactcctgagcctctctctaacatactcaccttcccctcccccatctttggtgtcttcagccacgtcctctctctggtcactctgtggagttggaatctgcagggagaaacccaagaatgagaccccaacactaaaatcccagttctttgagattcctggagagccaagggcttgttcctggacatgcaaaaggaatagccagtgcaaaggccctgaggtaggagcatgcctggtatgttaggacgcagccccaccctgtaatgaatgagggaaaggtggtaggaagtgagaccaaagaggagtgggcccaggtggctctgccagccacccctgactttgcacctactctgcactgggtgtggactaccattgaactcctcctatgcacagggcatggaccaccactgactgtgcacctgtcatcctttgcagttttggtgtttggggatagacgatgcccttataagtgtactgcttggccaggcatggtggtgcatgcctgtaatcccagcactttgggaggctgaggttggtggattatctgaggtcaggagttcgggaccagcctggccaacatggtgaaactccgtctctactagaaatacaaaatttagccgggcgtggtggtgcatgcctgtaatcccagctactagggaggctgaggcaggagaatcgcttggacctgggaggtggagattgcagtgagctcagatcatgcccctgcactccagtctgggtgacagaatgagactccgtctcaaaaataataataagtgtactgcttgcccttccagcatagagcagtgtcattcattgagtctggaccgtgggctccatgagggtgggaaaatccttgtttagcaaatggccagcccagggagtggctcagccctctccacattaggaccaggtggtgcctctgaactactatcctgggctgctctctgcaaccttaccaactttactgttccatccttagctaaatggttggcagtgtctacacatcagacactgtcccgagcactttatgaggcattccagctctcagagacccacagttcaccagcagccgcttcccagctctgggctgctgcaggagagatccttgctctcaggaatggcagatgcagcaagataccagcagcacaggccttgggcatggactgttctagcaatccggagcagcgggtgctgctatcttcctggttcacagctgagctctggatccagactggtgacctttgttaaagattctacgccaggcggccgggtgcagtggctccagcctgtaatcccagcactttgggaggccgaggcgggtggatcacaaggtcaggagatcgagaccatcctggctaacacggtgaaaccccgtctctactaaaaatacaaaaaaattagccgggtgtggtggcgggtgcctgtagtcccagctacttgggaggctgaggcaggagaatgacgtgaacctgggaggcagagcttgcagtgagccaagatggcaccactgcactctagcctgggtgacagagcgagactccatctcaaaaaaaaaaaaaagattctaggccgggtgcagtggctcatgcctgtaatcccagcactttgggaggctgaggagggcggatcgcctgaggtcaggagtttgagaccagcctgaccaacatggagaaacccctactctactaaaaatacaaaaaaaattagctgggtgtggtggtgcatgcctgtaatcccaactactctggaggctgaggcaggagaatcgcttgaatccaggaggtggaggttacggtgaacagagatcacgccatcgcactccaacctgggcaacaagaatgaaactccgtctaaaaaaataaaggattccaactgcggccgggtgtggtggctcacgcctataatcccagcactttgggaggctgaggtgggtgggttacttgaggtagggggttggagaccagcctggctaacatggcgaaaccttgtctctgaggcattagaattgcttgaacccgggaggcggaggttgtggtgagccgagatcgcaccactgcactccagttgggcaacacagtgagattctgtctccaaaaaaaaataaaagattccaactgcttacagtccccttttagggccattaactgctcagagccttcattgtttaatctgtaaatgattttcattaacactgtctacctctcaggactgtggagaggacaacaggaagcctctatagtgtcccctgcacagcaggtgcacattcagtggtggtctgtgcctgtgaatagcagatgcaaggtcaggatagctggcagagccacctgggcccactcctctttggtatcacttcataccaccttcctgtcattcattacaggatggggctgcgtcctaacacaccaggcacgatcctacctcagggcctttgcactggctgttccctttgcctggaacacccttcacctgatctccatgttgccagctcactccttcatgtccttccagtctttgctcaagtccgtctgctctctaagacgtgcccccaccatcctacttagtgatacaaactccacctcccaccgtgctgctccctggtgtcatgtgtcttactccactttttttttttttttttgaaacaaagtcttgctctattgtccaggctggagtgcagtggcatgctctcggctcactaaaacctctgcttcctgggctcaagcgattctcctgcctcagcctcctgagtagctgggattacaggtacacaccaccacacctggctaatttttgtatttttagtagagacaggtttctccttattggttggattagtctcgaactcctgacctcaggtgatttgcctgccccagcatcccaaagtgctgggattacaggcgtgtgccaccgcgcccagccattactctaccttttcatgatccattacccttatcatcatcacctcatcacattccagataactgactttgtgtcatgtatatggttgttctttccccactaaaacacaggcactgagagggcagggtctttggatatttagctcctggatgtatctgcaatgcctacgacaatgcttggcccaaaatacatgttcaataaatattctgttggaggaatgaatgatcacccatgttagtacctctgcagggctgtccccttttgttacatcatcactgcccactgctcattcctcactattccttccagaatgaacataagttaaatgaggaagggaggaagagaatgaaggaaattttaaaaaggaaggaaggtgaaagagaaggtaagagaattgaacagagataaggccctctccatagctgtgggcccagtgggttcttacctcggtaggtgtggccgtgggatgctgctccagggtactgtggtgctgggggtctgggccggggtctgaggctaggactgggggctgggagtctgggtcaaggtgcgggggtggcggttgggagctggttgtgaggggcccaggggctgggctggagtcttggggcgggggctcagtggcctgggggagctcatccatcccaaagatctgctcgtagtgcacgatgaggaactccacaagctgggcctgatgcccagagtccagcaggcaggtgacagggatggcgctggctgcccgcgggccgtccggcggccgcagcagtgtcggcccaaacacaatgcccaggttgttggcagacatcttgttttccataaatcgtgcagccaccctggggatggtgtgaagagaaaggtcagggtacaggatgcaagctcattggtctgagggtaagggtgggacacgcaggccagcctagaggtgacttgcccatgtcacaggtgtaagtcgtctgagaccagcagccacatatccagaactggaggtcaggggtcagtacccaaagttatgaatcatggattaaggttcagagttcagaaaacacaggtcaaaggtcagaggtcagtgtcaggggtcagccagggaagttagtagtcgcatgtccagggaaaagggtcgcgtttcaaggctcagggacccatgcacacctgaacagatgggccaccaggtgccgcagggtgttgtagttagagtcaggcagctgtaccaagagggtcttcagcgagcggataacctcagggctggggctgggggtcccagggtcgtccccagggtctgcatgcaaggtcttagccagagagatgaaggcgtcgtagaggtggaaggggatcacgggctcggtgagctgggggtggaacggagggcgcaacacgagtgtgggtgggctgtggagggctcctgcccgcgtccccctcagtgtcctgagcaccaacctcctgaagaaatcgcttgaggacactcgagacgtcatgaggcgagttccccgacagctccaccaacgctcggccattctcgaaagcctggcacagccgctccacacggacccgggacccgctgacccggtaaatgccctgcagggtgagggtgaaaaacagacacctggttcgtgataggccatcgattcggtcaggtcacttctggggatgatgaagggtcagggcagcacctgcacatccagggcacggtgttctatctcagccgtgcacttcgtgaccacaaagggtacctcctccgggaagtccctgggtagctgcaggaagtcaaccccaaaaaggggtgtccgggctgggagccgcctgtgtccacagaggatcaggagagtctccaggcagcgcttgtggcaggtcagaaagcactgtggggaaggtcacagggacagggaggtcattagggaccagtaggggaagagaaggttacaaggatcctcaaggaatgggggctcatgggagacatcaggttagggtgggtcccaggggcagaaaggctgtaggaatctcaggtcagggagatgatcaagggtcagcaaaggtcatttggtcattaacccaggccacacctcctcacactccgtcccgctgaccatgaaggcttcgcactcgcggcacttggctgggccccgcagtcgccgcagctggtgggtctgagccgcgctggacagtgtccacttcccgaaggggctgcccagcccattctccagcccgtctcccaggtctgcagggagacagggtcaggagtgcctggtgccctgccctgtcccatcctgacctaccctgcttcagcctcaccagggtctcgctcctcaaagtcatctgaggactcagtgcctgtggacgaagccttcaccagctgcctcgtgccagcgcctggggtcagaggaatcatgggagattcctgggctatgggaggcactcctggtttttagggcttccagaaccacccactaattcccaaggggtcagaggtcaggagggggattggacaggtcagtggttaagggttggagaattgggtcagcaacctgaggggggtggttcataagctggatcaagaggttgaggaaataggccgggcgcagtggctcacacctgtaatcccagcactttgggaagctgaggcaggaggatcacatgaggcaaggagtttgacaccagcctggccaacatggcaaaaccttgtctctactaaaaatacaaacattaaccaggcatggtggcaggcacctgtagtcccagctactcgggaggctgaggcacgagaatcgcttgaacctgggaggcggaggttgcagtgagccaagatcgtaccactgcgctccagcctgggcaacagagcaagactctgtctcaaaaaaaaaaaaaagaaagaaagaaaagaaaagaaaaggccgggcgtggtggcacacacctgtaatccctgcactttgggagaccgaggcaggtggatcacctgaggtcaggagttcgagatcagcctggccaacatggtgaaaccccgtctctactaaaaaatacaaaaatcagccggcgtggtagtgcacacctgtaatcccagctactccagaggctgagacaggagaatcgcttgaatctgggaggtggaggttgcagtgagccgagatcacgccactgcactccaggctgggcgacagaatgagactgtctcaaataaacaaacaaataaataaataaataatttttaaaaaggtaaaaaaagaggttgaggaaataggtcaggggtgtggggtaggtcagaggtcaaagatagttaaagattgagggtcagagcttggccaggggctggaggatggtcacaggtggagtgtgggtcaggaccaggtcctatccctacctgggctggaagtgggtgagtccagggaccgagactcgctgccgccacccacgctgtccacatcgctgcccggagtggggcctggagtccctaggtggcacaggtcaataaggatggtcccctgctcacaaaccccactcctgcagcccacctatgtgttggtggaacgaactcctggcaccactcccacctggccctcattgcactcaccttgccagcgccagcctgtgcccggatcctcccaagggcctggctcagctgaattctcatccagccttggaggaagaggcccagagagcttctttctgatgtccagaggggagctgagaagacagaagtttgaaggtttgaatcccaggaaactggcctggggtgatggcacccaggcatcatgtctaggtaccaactccaagcacttgggtctgcaaaccctgacacccagggcattgtggcccctgaaatacagtagccccacattcctgcccctgcccctaggactgggacaacccattcaccctcctatggcccccgagagcctggagtactaaattccactaaggctttgcgttctctaacctcgagtaaccagcctgcggtgccaacagcctggcatcgcgattccggggctcgttcccgactccctgctccagtgacccacctgttcaaggagggaaggaactcctggaaggagaaggcgggcggcgggggcggcggggcctcgggccgcagcgcccgtacaaactcctggtagcgctggcccggctcaaagggcgcacagcactcggccagggcggcgaaggcgcgggggccacgctctgcctgcgccccccgcagcccgaagagactcagcgtcacctgccgggtggagacagcaggttggggaggggcggagcctgggagcctgggggcagggccagagctggggcggggcttgagagacgcgaacgtggtcagggtttgggacgcacctgggcggcttaggaactagggcagtcggccaggggacccaggcatggtcagagcaggggctggtcatccaggggacaggacctcatggggcggagccgagacagtgggtctgggggcgggaactggctgtcgagggaaatggcctagtcctggtgtctccagggtggcttaggggcgaggagtggggcactcagtcggggccccaacggggtgaggggaggatggccttggggatgggcctcacccgcctcagcacttcatccccctgaaacaccagcttgcgcacgtgcgacacgattcgctgcttggcgatctccaggtcctgctgccgcgcgttggcctcgcggacacaggcctggtacagcgcctcggcctcctgcgcctggggaaacgggaggccaggagcggggtggggcgcgtgtgggcgagagtggagggcagggggcgccacagcgctacaggggctcggggccgggtgcccaccttggcctgggcctcctctcgcgagcgccgccgccgctcctgctgcttgctaggtcccggcgaggcctggggggccgagtcctcaggggacccctgggagcgtgcccgcaggtcctcgctgcgttgcacatactgcagctgggcgcgccgcagtgcctgcaccgcctcattctgggggatgatgagaaggtcagcgtcccggcctctctctcaccctacccttccaccaattccaagcctcaccatccgcttctgctccttcatccactgctccttgaactccttccgccacttctcaatctcagtccgtttggcggcgaggggctggcaagggttggggatggggatggagacgctgccttagggccaacccagaagcagccacccagtccttccattcctgcgccatgtgctttgccacctctggactctatttttttttttttcgagacggagttttgctcttgttgcccaggttggagtgcaagtgggcaatcatggctcactgcagcattgaacttgaactcttgagttcaagcaatcctccagcctcagcctctcagtagctaggactacaggcatgtgcactaggcctagttaatttaaaaaacaatttcttctttttttttttttttttggttggccaggtgtagtggctcatgcctttaatcccagcacttgggaggccaaagtgggcagatcacctgaggccaggagttcaagaccagcctgaccaacatggtgaaaccccgtctctacaaaaatacaaaaattataaagatgtgatggcacactcctatagtcccacctactcgggaggctgaggcaggagaatcacttgaacccgggaggcagaggttgcagtgagctgagatcatgccactgcactccagcctggatgataaagtgagactctgtctcaaaaaaaaaaataaataaataaattttttttggtagataaagacagggatctcactatgttgcccaggttagtctcgaactcctggcctcaagcaatcctccaccctcagcctcctagtagctagcactgcagacatgtgcaccaggcccagctaattaaaaaactttttttttttttttgtagagacagggggtctcactatgttgcccaggttggtctcaaactcctgggctcaagcaatcctccctccttggcccccagaagtgctgggattacaggcatgagccaccgtgccaggctggacccttttctgagtcagtattctcctcctggggtcttctccagacctgctctccccgacccctgagtccagaagtctcatgtagtcaccccatcctttctgcttggaagcagagacaccaaggctttcctcctgagaacactcagcacctcgttcccctccccacaaacaaaaacgaagtttttggctgggcgtggtggctcacgcctgtaatcccaccactttgggaagctgaggtaggtggattacctgaggtcaggagttggagaccagcctggccaacatggtgaaaccccatctgtactaaaaatacaaaaattagccgggcgtggtggcaggcgcctgtaatcccagctactcaggaggctgaggcaagtgaattgcttgaacccaagaagcggaggttgcagtgagctgagatcgcaccattgcaccccagcctgggcaaaagagcaagatattctgtctcaagaaaaaaagtaaagtgaagttttgcaattgcacaggaagcccagcttgaatctttgctgggtaaccttgggcaagttcccaagcatccccgggcctcagcttcctcatcaatgaaatggcgacgttggtagtggtgccttcctcccagcttgctgggaaacgaggggatcaggcctgaaggacagcaggatagcagggtgacctctgtaacattccaccctgcccccctcacctggtagtagtctcttttctgctgggccactgtctccatggccagggttcccaggctgagatcgtgctccagaaacagggtgtagatgtactgcagaggcatgtggctctggggaagacagagtggtgtaggaggatactgaagatctgtgggggacaaaggtggggttctagggggcttgggctctccgggggggtctggtcatgactacctgctgttgaatggacaccttgccagcttcagcgatcttcatggtgctcttagcaaactccagctctgggggaagagagagccgggctctgggtctagctggggtctggggactgcctggtaactggggctgggcggaagaggtcctcaccatagctggctctcttttcagtccaggcaagcagttccttggcatagcggctccaggtcttggcatattccagggctgcgtccacacccccctttgtccgaatgagccgcaagtccagttcctcccctggggaagatggatggacctctgacctttgcaccctagtctgctatggatgtcttccctaagcccccagaccagcccagtggcacctgtcctacagcctcacagctccccaaacactactttgggatcacttgtcctggttgcaattttacagattcactgttttttgttttttattttttattattttattatttatttatttatttttgagactgtgtttcgctcttgttgcccaggctagagtgcaatggcgcgattttggctcaccaaaacctctgcctcccgggttcaagcgattctcctgcctcagcctcctgagtagctgggattacaggcatgcgccaccatgcccggctaattttttgtatttttagtagagacgaggtttctctatgttggtcaggctggtctcgaactcccaatctcaggtgatctgcccgcctcggcctcccaaagtgctgggattacaggcatgagccaccgtgcccggcctgtgtttgatgggtttttttatttttatttttgaggcggagtctcgctctgtcgctcaggctggagtgcaatggccctattttgcctcactgcaagctccgcctcctgggttcccgccattctcctgcctcagcctcccgagtatctgggactacaggcactcgccactgcgcccggctaaatttttttgtatttttagtagagatggggtttcaccatgttagccaggatggtctcgatctcctgacctcgtggtccacccgcctcagcctccaaagtgctgggattacaggcgtgagccactgcgtccggccttgtgtttgatttttttggacatggtcttgctctgtcatccaggctggagtgcagtggcacaatcgtatctcactgcagcctcaaagtcctgggcttaatcagtcctccagcctcagcttccaaagtagctgggactacaggcacacaccaccacacccagctaattaaaaaaatattttttcttttggtagggatggtgtcttactgttgcccagcatggtcacgaattcctggcttcaagtgatcctcctacctcagcctccaccctgcctggggtctccctgagggctgggactgagatctgttgtgtgtactgccatattcccaaaacctaaacgatgccttgcatggaacaggggatcagtggtgatttgttgaaggaaagactcctgtctgtccccactgtcctggcctccagacccccctacctgtgaggggtacaggaccctctggggaggggccgctccaacagctggcttcgttggtctgtgcgggagggagacagtattcagaagcaaacagggcaggggcctggccttcctaaggccccctctgcttgaggtcttcctccctgttcccctactccccactcacaacagtggctgtaggggtcttgtcaggttctgggtcttctgagagtagagggtctccagccagcatctcaagggtcctgggggataaaggtgtgtcaggatgccaccttacacccagtctgtcctgccaaggggtgctggggaccttagggttgtttgtggcaaacatcacctctgtggcatctcttgtgtctgggaggtctgaagaatggtgttttgggggaatcaggtgagttttttttaaataggacttgaaaaagcatctgaagggccccagataactttgaggttcatagagtgggattatagggatcgcaaatattttaaggggttacaaggatatgtaggggttctaggaccactttggggatttccagtctatttagggggacacttttaggataccgaggcattttggagggtcccatcctagacttctctggttattaggtatgtaggtccagatgttacaggttccaaatgggactgcaaggcacctaaatggttaggggcttggggcatcttggcaggatttgggggtgatccaggctcagactcacacgttccccagtgagatttcgaggttgtccaggctccggaagatgtcactgtacctcttcctgccctcaggacctggggggagtcctaggggaggggagtgtaatacatgggctaaccactgcctccctccacccacggcacctcaaccagtctcatttggagggggtggaagagaaagggaagagtgagagagagaaagagagggctggggggggcttggttggggccaactcgaggcaggcagatggactcacacaccaccagagaccagagacagctgctcggggaacagagacacccactccctgggtctgcctgcacccagaagcaaaccaacaaaacagatgccccagatgcaaccaggctgtcccgagaagaaagccggtctgacaatggaaccacgggctagacagatggaaatacacaagggacagccaggcagagcctggggcagaaacacacatggagagactgaagccgtgagggacataaagaccgaatgacactccacatacacaacacagacacaaagacggccggaaacaccaagtcggaccccgccacatttctactgctgcccccctgccccctctcctaaggggcctagaccagcactgccgactccccagggctacagaggggccctgtggggatcctaccgcgttgccctctccctcagcagtcgtggcaccctgcccccatcacaaaaatcagaagcagaagcagtcacttccccttcctgggccccctcccccaggcgtctggggtgagggatcaaaagggggagggggagtgaagggctggggtcctgaacccatccgggcacagggctccccacaatggaggatccctgggtccttcccattcaggaactcctctcctggctctcaggacggagcgggacaagtgtgtgccctcaatgtaggaagcaggggatggtcgggggaggcccctcccggatccccgaccccctacccggctctgctgcgtccatatctgggcccggggatcgctctgcagggaccgggatggggatggggtcgcgcgccggcggggccgagccccgatttcctgccgccgcagccgccgccgccgcctcggttccgcgtcgccctgcccagcggaggccacgcccccgcatcagaccacgcccccgtagcccggaagccttgatagtgcccttctctacctgagccgcttgaaactgggtcgggccagggccccctgagcgaccactcgaggctgcagtgcccctgacctgggcatcctaagacttcatctgggccataggttccctctcagatctttgtgctaccccaaatcccacggagccccagccccctcctccctgaatggttgcagagtccacctgtcccggggggcctctcccaggagctcccacaacccgcgaccctggtgatccccttgcccaggttgtctctcggagccctgaaaccacctgggcctcgctggagccatggcgccccctggtggaggcctgatattctgtccgattccaaccaaaattctaatactcgggctggagaacccctggcctgggggacgccccttccgtgaccctcaaagctggatcaggctcaaggccccaattacagcacaccagggagcagcccttttaggtagggagtggaggtttgtccaaaagcaccagctctggggttgccacaagccgcctgttataaaaatgctcccacccccagcacagtggaattttggggctggaaatagactttaaagtatgtttataactttgtgtccaaaggctttggctgttaaggaggcaaggattctctgactggctccgtgctgcctactctgcagttcttgagttgtgatgagtgagtccattgaaaggaataacactatcaacctaagagccaagccaggtttccaggtcacatcctggctgatgctcagccagagctccctgactgtgacatgagatggtagagcagcgcaggcccccaaagagcatgacagagtcagtacttgtttgtttttcttttgagttggagtctcgctctgttgcccaggctggagtgcagtggcgttatctcggctcactgcaagctccacctcctgggttcacgccattctcctgcctcagcctcccgagtaactgggactacaggcactcgccaccatgcctggctaattttttgtatttttagtagagatggggtttcactgtgttagccaggatggtctcgatctcctgaccttgtgatgggcccgccttggcctcccaaagtgctgggattacaggcttgagccaccggacagagtcaatacttgtaatgatgcagatcatattcctcaagtctcagacaccacccgagagaaaggcatgctgttatgtattatgggaaagaaaaaaatatcacacatcctaaggcttctctcagcacctgagttgttaaaatgtgaaagagacctcagaaatatgggggtgcttgttaaactagaaaatatgcactgaattctctgggcagggacaagtccatgttcaagtgctgaaagtgccagagggtttcaccaacatcacacgcctgtggggagggtgctgggaccttcctcagtgaccctctgtccccgagcccccagcaaacaccgtgtggcacagacgaggtggaggcagggctttttaaaatctcagatgctgctttatttaccaaaggtgctggcttggggctggttctgctggccaagccagcggatggctgtgggggtcccagctcagtcttccaagggcgagactgtacagccttgctgtggggggttgggggcagggttccctcccggggccctgttggggttcccgcccagcggcagccagggtgggcagtgggtaccagcactgccatctcaggaaggcactttcagcttcggggtccccaggaagaactgcaggacgcggtcggccaggagcgccaggcagaagtccaggagcaggacctgggcaatgaccagcttgaactgtcggggcagggagggatggtgagctggagacctgcagcccagctcagggtcactgccataggagggacccatcaagctgagccccagggtcacctccacagggccactgacctccacagggatgtccacgaggccaaactggctgttgaagtcgggcgaggagccgaggagcaggccaatgatggccaggagtgaaactgccagactccacaccaggggcttgttctcgggcaggctctccatgaagggcgggccctgtggggatgagggacagatggcttcatggggtggggctgggtgggcagacagtgaatgtttgggcagggcccaggccttactttgtaattgatggcgaaggtggccatctgcatggccatggccatgatgtagacggtgctgttgaccaggcttggctcaaactccttgtacaagtccacgaactgctcctgcctgcaaggacacatgggagtcagggccccctctcctgctccggctcacacacactgtgtggcttcctgctgccctggcacagagctagggctctgcctggcctagtgcccctccctggacaccctggacaacccccagcctctcctgctgaagtctgtggagtcatcctcctgctattctcagctgcagggacatcacctcctccaaggcagcacttacttctcggggctccgggcctgggcctcacggtacaggtagacaaggctcaggaagtgcacaaagaactggagcatgacggtgaggatggtgtacaggttgaagatgttgggcaggggccgttctcgggagagggtcttgaggggctgcagcagcaaggcgggtgggggagtcaggatctggctcacttggggccaccctgcccacacagcaggcagtaacatcccctgcctcccgggagaccttgtgtacagccaccaccaaatcctgggggattccatgggtcagcaccagtccctggatccctgcctgcctctcacccctgagcccagggctgcctccctggccccggctccgccatccaggctccccatggcagccacaggggcctgagaatcatgaagcagatcctgccctccctggagcccacgggacaggcacagtcccgcccagccaatctcccaccccctccagccaccggggactccctgcgtcagcccatgcctgtttggggcctttgtgtccagttcctggccgctggcccccctggttctttacgccttggcctgagtgtcggtgtcgcacaggcctccccagctgtccaccagcctgtcctgtgtagcctatgacccacttagttgtttttttaccctcttgatgattgttccttgcttgtggggctctgtggggcccacccctgggacccctacctgtggacaggtgtggacgccaagctgtaccacctggaggggtctgggagcctcagtccacacctgccctgccagcatttcctgagccatcccagctacagcccccatctctggggccctgggtcctgtaacttggggatgacaattcccgtgcctatatcagcctggccctggcaggcccatgcatccctggccttccagcacctctggggcccaccttggaacgggagatgaagaggaagcagccggccagcagcagcccctgtagggtggcctggaagtcactgaacttgactccctccaggtagaggacgctctggctgtaggccaggatgagggcattgagcgccaggatcttgaacatctgtagcgtggtcaccagcgtgcagcggccctgcttgatcacgtggcagactgcagggtggtggggaggcaggtgtgggtgtgggtaggggtgccaaggggggaatgaagggagggggagcgggggcaggcaactcactgcactggatggatgagagcttggaggtgaagggtgctgcgatgctggcatcccccagtttcacaatgggcgtactctcgtcctcgaggtctcgcagcacctggctcaggcggtcctgcagggtagacagcaggctgtcagccctggccaggatggggtgcagcacctcccctcttgggactcaccctctgggaggttggctgctcctcggagggagggagccccgaccgctgcttggctgtcctggaggtggctctgatgccactgttgctcagggttgggctgtcccggggccgccgtcgccgctcgacaacccgctcaggggcattggccaagagcgccacacctggggggcaggagggtgtcagacccggaggagcaggctccacggaggggaagattgctggcttcagagccactggtcctgaagtcccccagctggctcccgtgaggacagttcccagacttccccatttcacctgacaccctaaggagacctcagagagtgcccgtgttgctttctacaaactactttaagaaaacaaaccaccaacaataaacccccacaacaaatgcaatgaaaaaacacacaacacgagataggtcaaaactaaactgattttggccgagcgcagtggctcacacctgttatctcagcactttggaaggctgaggtgggcggatcacctgaggtcaggagtttgagaccagcctggctgatacggcgaaaccccgtctctactaaaaatacaaaaattagccaggggtggtggcatgtgcctgtaattccagctactcgggaggctgaggcaggagaatcgcttgaacccgggaggcggaggttgcagtgagatgagatcacaccaccgcactccagcctgggcgacagagcgagacagtctcaaaataaaacaaaacaaaacaacctaaactgatttcaaaagaaatagccaaggagcatgattctaggaggcaaacaacactcaataaatgctttagtagataaaagcagataaatattggaaaagcaaaaaaaccaacgtaagattgatctttaaaattcaatttaacacctgagttcttgcaaaaaaaaaaaaagaaaaaagaaaaaaaggccaggtgaggtggctcacacctgtaatcccagcactttgggaggccaacacaggcgcatcatctgaagtcaggagttggagaccagcctggccaacatggtgaaaccccatctctactaaaaatacaaaaattagatgggcatggtggctggcgcctgtaatcctagctacttgggaggctgaagaaggagaattgcttgaacccgggaagtagaggttgcagtgagctgagaccgtgctattgcactccagcctgggcaacaagagagaaactgtctcaaaaaaaaaaaaaaaaaaaaaaggcagggttcggtgggatgcagtggttcacacctgtaatcctagcactttgggaggccaaggcgggtggatcacttgaggtcaggaattggagaccatcctggccaacatggtgaaaccccatctctactaaaaatacaaaaattagccaggcatggtggcacgtgcctgtaatcccagctatttgggaggctgaggcaggagaatcgcttgaacccgggagatggaggttgcagtgagcccagatcgtgccattgtactccagcctgggtgacagagcaaggctccgtcaaaaaaaaaaaagacagggtcttgcactgtcacttaggttagagtggatcacaccactgccttgaactcccagactcaagtgatcctcccgcctcagcctcccaaagcactgggattccaggcaggagccacagtgctcagccatctgtgtgcttttgacagagatctggggctatgaaccatcttcatggcttcagctctgggttttctgagtcactctcccaacttgttgcctctctcctggcctctggcctccgccctgctctgttcctgggatattcgcatcccttcctgccctcaaagcccctgaccttgccaccccctcccatcctcacaggaattagtgcccccgtggctgtcaccaagggccaggtctgtctttctagctcagtgacatgtcctcaacacctcgtccacaaacgaaataccctagcccacagcactcacccacgtcagcatgcttcagggcgcccacgtcgttggtgccatccccacacatgagggtcacgtagcccagctccttcaggctggtgatgacaaactcctgtatgggcggagacaggctgagcaggggctgcgtgcctaccgctgtgcccctgacccctagggctgtgcacataccttctgcttgggagccacacgggcgaacacctgcacatgggggatgaggcggagcagctgctgggggtcggtggcctgcaggtgggccaagccgtcgcctgtgaggcacagtgcgtactccagggccagtgcctttggggagccccgggccaggggcagcacgatgctgccgtcaatggagcgccactcgcactgccggcctgcgggcagcacctagggttagggctgggggcttggctgaccgggctcagaagcaccctccctccactcggaccccagcaccagccagtctctcctctctggagcccgcacctccctacccacccaggtgacccccagcccttctctggggactccacaaagaatgtccctcaggtgcacagggtggaaccaagagcctggggcctgagctacttgcctgagagcccgggacacagccagattagaacctgggcagtctgaccccagctaagccatgcccccacctcatgcaaggccccctaacctgaaacacacagaagggggctattgcgctctccttgggaaaccccacaccaggccctcacctcatttatccctgcgcccgtggcctctctgaaatcctgttttctcggggctgggccccctcccaactctgacagggcccctgagttctcaacatcttcttgctccacttcccctttcttgctggctggccctggcttggatgctgggcgctgaggatggccaagggcggcccgccagccctcctggcactgcctgctcaccctggaccatctcaagctgaagggcagcacacttccacctggcttgtgctgcagctgttgctagaccagcttcgcttgtcaatcaacagttctgctcatccgctccatgccacctgcccacaatccccaggccctggaagaccccggtagctggggctgggacagggggaggcctgcgaccaatagaacagagggagggcagggaccgagtcctctgagaggtggcctggaggttccggaagctgctctggcccagacctgtgaatgtttgctgccagcagccctgtggcaacactgctccatgtggttcttcttagggccctgtcaacactcatgcaggtcctgaactgcgtgcgcccacaggggcttcacctctagctctggggcaggtatctggtaagccccacacctctagctgggaggggctgggtctctatgtctgcctcttcatcaatctgaatccagggcattgctcaaagaggtcactggggagaggttggagccttgagctctggaatcaggctgtctggattccaatccttagccatggattggaagtgacctgggcaagtgggttcacttctgagcctctgtcccttctctacaaagcagggccccgagagctgacccagccagcttcctcctctgtggtgtggggaaggcaagccaccccgtgtggtgcaggatggggtggagggaccaacgcagtaacacgcacggagcgctccgcctggggtctggtcaggctgagcactgggcaaactgccatcaactgtggctgaggatgccagcagtccctgtgctcgggaagggagcactcggtacatgggcagcttgccgggccaaagagggtgtgaaatgaggatgacactgaggatggggagtaagcgtggtaggagcagtatctgcccatgagtgcacaggaaacccgagctggcagtcagactatcgcctcattatggtaaataaacacctacatgccgcacatcctgggacctgcgacccagtgaacgctcacatgctgtccgaggtgcccagtgggccagggctgtgattagtggtgccaggcatttgaagacactgtgctgctgaggcctggtacacaggtgggctgttgcgatgggagctgttcttggactcagggtcccccttccccactgtgggccaggctagggcctcacctttctcggagggaggctgcaggatcagcgtgtgggccttttcaatgaagtgcagctcctgggccacgtggcatgcagtgagcgggttgtctcccgtgatcatgaccaccttgggtaaagaggggcagaggctcagcatggcaccctggggccaagctctaggccagagacaaggctgccaagtctccttctaaggtaggccacagtgggagatcctgggcctctaaccgagatgctgaatgggcttccaagggccacaacccacccccacccaggtcattttacacaaatgacacgtgtatgtgcgtccttctgaagacacccttagcttggatttgcaatacaaatgaacaacctgcccctgaggtggacccttttggcttggtagctgcccatgggggtaatatttcagcaaagaggaggatgggaccatgacctctgggcttggtggggactaatcacatcacccatgtgacccagagccatcatcctctgagacggctcactcaccccttacaccctaaaagacaccctaagtcccaaaatagaaaacacaagccaccagaagccaccaggacaggcagacagtgccccccacccaactccccagcctcagcttccttctctccaggacggcggtggaacggggaagtggagagaagtgcccccatcttcccatgatgcggggagtgaagggagtggtctgtggaggagagaggagccagcacaggcgggtcccagagtgtccttgggccagtggcaatgttagcacctgagctatgatcttgctcagctaaaacatgcagcctgtgagacttgggtgcccacccctaccacgaagctgtaattgtcatctcctcgcctctatttcccatgcagagggtggagccgagcaccgtcccatacccggtgggacgcattctggatctcccggatcacggccttggagtcagccttgagcgggcaggagaccacaatgaagccgacgaacttgaggctgcactccagggcctcccgcttgacctcccgggcctgcggacagacaggggcaccctcaccatctgtccctccctctgcccacactctgcatttcctgagctctgaccatgcgctgggagccaaggggacaatggaaggccctgttcccgtagtgggcacatgcgagggttgggaggggagaaatgccaggagggtaccaggcacgcttgaggggtgggatctggcagtgactggggggtctgggtcccccgaatgtggctctatgtcctgcttgcggacatgggcacatcacagagtcccttgtggctcagcttccaagtcaatgaagtagggactctcccaataatgttggagtttagccaggaactcttactcactggggctccaccacataccacagactgggcacagacccctggccttagggagctcacactgcaccaggggagacgcatgatcaagaaagtcacagaaatcggagtgctgagtgccatgagagaggaggtgagaatggaatccagagagggtggaaaggcctcagaagtggccactatgaaggcgatgaggacctgtgtcactgggaagggggctccaggtgcaggaacggggcagagcatgcaggctgtgagctgtggcctgggctctgcacacagtactgcaacctgaggctaaattctggaaggatccgcagctgtagggtgcaagcagaaagaacgagagcccaggaagaagccaagcggcagatgtgccggtggtggaggcggagggtgggctttgtggaggatggatgggtgagagggctgaggatgccacctagccctgcccaagaccagggcaaaagagtagagctagggacacaccaggactggggcaggtaagccctgcgtgtgctctgcgtgagccaggactgggtgggtccccacagcagtggacagactgagtgccatttggagtctccaaaggtagaagctggaggcggggcaaggaggacaaaatcacaaccattcaacctggcactgtgggacacaggaggtgactcagggaggagctgacgggccaggcacatggtgaaggcagggggagcctgggcccgtacctgctggtgagtgaggtgtcccagctccttgtaccccagcgccaggacgcgggctccttcccgggagatctcggtgtggatgtggtggtagtcgggcgggcactgggagaactgcagggaatgcagggggatgtcacgggctgccccgcgcccccaccccttgccccaggctggggccagctcaccatggagtgcagagtttcgggggcccccttcacggccgcgatgtagcagaggtcggtggagcccagcttctcatacgaggcaagcacggacattcgcttcagggcactggcaaaatgaaagcgctggtgaattttcagcccctgagttttaatacttcgggggaatactttctcatctggaaacaaataagtacgagtcctgaggggctttgctccaaagaggcagccaagcccctacctctcaccccggcctcccccacctccctcctgcctcccccagggcctgatcggggctctgggctagagcaggtgttggtccagagctggaagacctgggcttggaggaccctggcactgtggcttcggccagggcagggcagattccaacccagagggacacccaaggacgtggcctatcctgggtctaaagtgagcctctggccacccacctcggggagcatcagagctgtaggcctgcctgtccccaagatgctctgaggggtgcagcccacctgcctagggctgtgagagccagtggctcccccttgctgggcctgaggccccagcccctcacctttggtcagcgtccagtccacggccgtcagcatggccttctctagagggtcacccacgagggtgccgtcgtccagctgcatgagcgagtggcacgaggccagggcccggtgtgtttctacagggatgctggacactggggtcacctccttcccgtctctgcaaggtcggggaacagctggttacagagtgcaggcgggtagggcgaagctgcatccccaccagcagaaggacccccaaggccattcattccgtgcttgtcactggggtggcttgggcgccaactgggtctttatgagacctgcacctgcttcacagatgcccccagaagccaggcattgtgcctgggggtcatgtggtgcatggctggtgtgggatgttccaggcctgagctgagcccccgtgccgctaccatggctgacacccaggactttgtggggagcccctggaaatgaacccgaggcagggcctctgacgggccctcactgcaagggcttggggtggatgggccacctgtctctcgacttcccagaaaccccatctgggtgacctttgctgcagggcccctgatgcttacctcagcccggccacaccgcgcaccaccaggctgtcactggtcaacgtccccgtcttgtcaaagcagcacacctcgaccttgccagcaaaggggatccggaagggctctgtgcagtacatgtctaggggcgggagtgaggtcaggggtcctgcttggccccagcccactcggcaccccatcccatttgacacactcacagagcttggccagggcgatgagggaggtgttgacggccagggacagctcgatgggcagctcaggaggcacgaccgaggtgaggatcagggtgcactccagaaacagcttgtagcggttccggctggggtccttggtacctgtggagacagggcctgccaacctggagcctcggagggtgggcgcaggggaccacagaggccgtggcgcttaccttcaatccatacataggcagctgcagcgatggcaaacaccaggaggaagaggatgaagatgaaggtctccaggttgttcgcagtcaccctcttgaccccgaagaggatggtgcgcagcagcttgccctggaggaatggaggaacagcctttctgctgtctggactccctccagcagctcaggcctggaagcgtgggcctggtcttggggtggcctctgcaccctggcccaggtccagggccgtgctgccagagtcagcccgtggggcagatgttctggggtcggaaagggctgataccttggctgtccaactgccctggggcccgccctccccagacctggccccgcacctgggatgtgttgaatccggtccgcaggacgtaggccacgcacccgctgtcaaccgctggggagagaagcagagtcaccgtcatgcctgtctcctcgtcctgactccctcatgatcaagcagacgggcaaagggggtggaagcccagatacccccagacgcccatgaggcacctacgcttcaggcccgtggtggctttctgtggggggatgtgctgcaccaccttggtgcccccgaagatgacgtgcagccgggaatcagcctggaggtccagcacccggtctgggctgaggtcttcgatgggctcctggggaggaagatcgtgaatctggatggccaggcctaccttgcttccttctccatctgagttcctggacagctggaccttgaggctggaatgagccagggggatccccacccgaccaatacatcccacccagctcccagatcctcaccctcaccccgtcctgtcttctccccattgcactcacagtgcctgctctctggggcctgcacttggcctcgtctgggactcacccctctggactgctcccagcccaccttggtctgacatcccagggcaccaatgtaccctggatgcccttggctctctcacctccttcctcgcccccaccacccggctccccagtccacagagctcatctgtgcccacactgcctcctccgcctgtgcctgagggggatccccgccaccccctgggcctccacctcctggcctgtttcctcctgaacagcttgaggatccccatcctccaccaagtaccttcatctgtggcacggactcccccgtgagcatggcctcgtctacgatgcagcggcctcgcagcagaagcacgtcacatggcaccaggttctcctgtggggagcggcctgcagggcagaggcaggagggttggccagaggccctgaggctggggctcccactgggactgagcggaacccggcctcaccgatggagacgatgtcccctggtacgatctcatcactggcaatgggcctccacttgcggcttcggtagacctgggcggggcatgggtgtcagcacagaagccgcacctgtgctgcacccccaacctgggtctccctggcagccacacctggatcatgtggggcttgttgcccatcttccggatctccgacatgttccgcatctgctgctgcaccagcgaggcctcgaacgccaccagcatggatagcgtaaagacgctgtagtaccagtactcatccaggcaccagagccccacacagaacacctgtgggataccagcctgtctgtccttgccctacccgccctgttcccatgagccccttccacccaccggatctgatatgtgagggtggggagaggcttccaggtttagaagtggtgggcaggcttgatccggttaggaaagccccaagggaggaaatggggagatgggccagagctgctgctttacctgaaatacaaagaagggggctgtggctctctccttgaaaagctccgagaagtcaggcaccaccatctcggccctgcaagagaccaggccccatcctgttcccagggcaaggcctctggggtatggagtctccaccctgacccctccaacctgagcatggcaggccgctctcaagaaaccaagagccatatgtgggcgtcgggagccctggcgagcttccagataggaggatccatttggcagtggctctccctcatcctggctgagcctggggtagacatgctgcccgcccacagccctcggctctgcataaaacagatgaagctccttaatctgcaatatgctcttcctggcagcctggggctggtgtcagacgagagcccgtcatctggtcgagtgacacagcaagtagagaaggaacctctgattgaaagatggaggccctgaagctacagacagcagaagacactgagacccagccccaccaaagctgagattttctatgattcctgaattaaagccccagaatgggtcgagtagggtggttcacgcctgtaatcccaagcactttgggaggccgaggcaggaggagtgcttgagcccaggagtcagagactagcctgggcaacacagcaagaccttctatttacaaaaaatttaaaaattagctgggggtggtggtgtgtgcctgtggtcccagctatttgggaggctgaggcaggatgaatgcttgagcccaggagttcaaggctacagtgagccatgatcacaccactgcactccagcctgggtaacagagtaagaccctgtctccaaaaaaaaaaaaaaaaaaaaaaaaggctcgagaatgcaaggacttgggcctaagggtgtgttctgcagtactctgtgccatagtccaatctgatcagggcaccagtcatgtcaacgagggtcattctcgctctgccctttaactgcatggacgtcttatgtatgggatgtgagaagaggaaaccaaagagcaaccccactgctatcaaacaataagcccttcccttgtatcttgctgggtacctttgcgttgagtaagaacagcatgaaagggaacgtagttgccacaggccattaatgtgactggccaaccttggggtaggggaagttgctaaatgtttcttataaatccttgtattagattgatagttgtagtcaacatatttgtaatctctgaacagtgattaagtcaggaaagagctccctaggtgttctgtgggtttctgggttgaggaccatcgtaacaaggccatgatggggtttggagcccagttctccggctcccagccacgtgtcagcatttgcagttttggtgaagatgaagggagagggtgtgcaccgcacattggccattgtactcagtacaaaagggcagacatggtcacggtcttccatcaccattctgaagcgctgagatgcgtagactcgaaacagtgaggactgaaatgtttaggttgggtgcagtgactcatgcctgtaatcccagcactttgggatgttgatttaggaggactgcttgaggccaggagtttgagacaagcctgggcaacacggcgagaccccatctctacacaaataaacattttaaaagaatttaaaataaagctgttgctgaggaggggccacaggctagactcctgtgaagaaccttacactcaaggtctcacaccccagggcacgggcttccagctgcagaccctctggggttcctgccagcaggcaagttcaggggagactggacttagagcatgttgctcaagcggcatcacagtcacctgggacatttggctaaaagggcagatttggccgggtgcagtggctcacgcctgtaatcccagcactttgggaggccaacatgggaggatcacctgaggtcaggagttcaagaccagcctggccaacatggtgaaacccccatctctactaaaaatacaaaaattagccaggcgtggtggggggagcctgtattcccagctgcttggcaggttgaggcaggagaatcacttgaaccggggaggcggaggttggggtgagctgagatcgcgtcactgcactccagcctgggtgacagagcgagactcagtctcaaaaataaaaaataaaataaaaataaaataatagtaaataaataaataaaagggcagatgcctctgtcccgcttcctaggcaccctgaatcaggaggggagcaggacagaaaggcaaaggtgctacaggcaaatcaaggactcacttgttgctcccaaatttcttctcagctgctcggatctctgagtcttcctggaagcctctgttgctctgatagtatgagaaggcgtttcccacaggaaaggccacggggagaaactgcttcttctccagggcatcgtaggaatacttgatcttctggaattcgaaggacagcacctcaagcccgtcttcgccctgcggtagaaggtgtgtttgccacagaggcccctgaccttggggtgtcagcgcctgggaatcctactcaagcccctcctccaggagcccagcaggcagtccctacctcattgcggtgcagggccacgagctccgtggagccattgttgggggttggcaccaccttcacaaaggtcgctttgctggggtcgtactcctgacagagacaaagaaagcattgtggcttagctcttctcaacctacagttccaagacccccccgggaggttttgggtgcagcagctctatgggtatattctgaaatgccactgggctctggtgctgcctctgtcactccctcgtctgtcatcaggacaaacgagaccatcttgctgtgcctctggtgccacacttaaagctgggagcacaaggctgggcacggtgactcacacccataatcccagcactttgggaggccaaggtgggcggatcacttgagatcaggagtttgagatcagcctcgccaatgtggcgaaaccctgtctcaactaaaaatacacaaatgagccggacacggtggtgcacacctgtaataccagctacttaggaggctgaggcaggagaatcccttgaactgggaggcggaggttgcagtgaactgagattgcaacactgcactccagcctgggtggcagagtgagatcctatctcaattaaaaaaaaaaaaacaaaaaaccagccaggcacagtggctcgcacctgtaatcccagcactttgggaggccgaggtgggcagatcacgacgtcaggagattgagaccatcctggctaacacggtgaaaccccatctctactaaaaacacaaaaaattagctgggcgtggtggcaggcatctgtagtcccagctacttgggaggctgaggcaggagaatggcgtgcacccaggaggcagagcttgcagtgagccgagattgcaccactgcactccagcctgggcgacagagcaggactctgtctcaaaataaaaaggctgggtgcagtggctcacacctgtaatcccagcactttgggaggctgaggcaggggggatcacgaggtcaggagtttgagaccagcctggccaatatggtgaaaccccgtctctactaaaaatataaaaattagctgggcatagtggcaggcacctgtagtctcagctactcgggaggctgaggcagaacaatcacttgaacctgggaggcggaggttgcagtgagccgagattgtgccactgcactccagcctgggcaacagagccagactccatctcaaaaacaaacaaacaaacaaacaaaaaaaccccaaaaaacaaaacaaaaacaaaaacaacaacaaaaaaagctgggaagctgggtgcacagacagcacctaatgcccagggctctgctctgctgaaggtgacatgaactcaaataggaagaacgctgccaggcacccacccagtacgtcctcaattcacgtgagccaagcccccgccccatcacaggcccccggcctcctgctcagctctgcctcttccaccaaccctgctcactacactccacagctccacacgcacatggggctcgatcgtgcctcagcaaagggccttggcatgtgctgttttctctgcccggaatacacagtcacacagctcccttgctgcctcaggcttttgctgaaacatcaccttctcaggagcccctccctggctgccccatctaaagttcccggcaatgtcccatcctgtcctgatgttagatgtcatctctgtttggcatcaactgctgactatgagttctccctcccagtaacaccacaaaggcagggggatttgcctgttttgttcactgctgtttccccagcacctaagacacagaaatgttgaatggaactcgttcagtgctccctggaccccgtgaaccgccatccattcctctgctgctctgctagaccgagctgcatggagacgagctgcatggagatggggggagcacaatgatgacccgcagaaacaaagcgccaccgcacgggtggttcatgggcctccaaagcaggcagcaaataacaacaatcacataactacaaacgtgacgtcacggaagaaaggtacaagaggctatacgctgtgatggccccagggcgggcactctgcagatatcatctccgcttctcaagatggcacccagtagttgttagttacggttctcagtttacagaagggggaaactgaaactcagagagcagaagcggccctttctgagatctgaatcaaacccagatccacctctcctggctgatggctgttcagctcctcccacttctccatccctggagaggaagttaagagctaagctgcttagctgcaggtcaaaaggcagctgaagtttgagcggtgccacagtccccttaacccctcctttattttgtccctcattggtgtctttcattgtactacctcaaagctaccacgttgagctcctcccctgggatagataagtctttttgaaggacagaacaggttgtctctcaggagaggagaatgaggattctacccacattcagagccagccagggtggggggcttctgtctttctgtagcccttgatgctgttcccttttcctcttcttgaggcaaacacactcctggaatcagaggggaagcttcctgatatacctcagtgtccatggctccaaacctgctggtgtcacctgaggcaggcccagagagagacgacacagtcactgcttcaggcccagggaagctcacagtcaccaactcctccgacgacacttggtcactcagaactctaaactgtgggtcaggagcgcgaccttgcttgctgttgtatccccgacagaactcagtatcaccaccctcattttgcggaaagacatcatgtaaatgactcgctcataaacacctctgcctctcttcaacactgtaattaactgcatttcatgctcctttccatcacagtatggaagaccactaagcactggacagcaagacttggttcagtctaagaaccaactaagcttcatagatgggggaaacctatcccagtgatctcgccttacactttgaaaaccaaggtaggagacagatgagatggaaggtagggccgtttccagaacaagagtagtcgctaatatgggaactagtataaacaactcctacctgacctgggcgacgtatgctgggccctgcgctaagccttttacaagtattacatcactgaatctaaatgaccataacagggaggacttcagaaaaaggaaataacccgcaccaggcatgcacagcaagtcagcagtggggtcatgattaagcctgcgccaaagtgtagagggtgcccctgggaatccaggccaggcagatgagtggcccaggtcgcgatggtgaccgacaggaaggccgcagctgggacccacggcgaggctcgaccgtgctgggggtcgggctcgcgtgtacacacttaccggggtgcaggtgagcgcgcaatgcgcgtgcacagaccaatgccccgagaggacagtgagcgcgtgcgcgaggcagatggtggcaagcacgagcagcgcagcttcggggatctgcacccaactgctgccccagccccagcagccagcggctgcggcacccaaccaggccgggtaaagcagcccggcgaatggcagcaccgtgaggcgccgcaacagcgccaaccgccggtacggccacacggcagccaccagctcgtcaccgttcgctatgagcgccggcccggcggcaaggagcgcgcgcggctgcggcccgggcttgggctgcccgtcaggccggaccccgcaaggccgggccccgcagggcaccgcgttgcccaccgccgccgctgccgccatctttcctagcgccgcgctcacttccgggcagaggaacgcctcacttccgaagttttacttccggtaagccctgagcgccgccatggcagcctggactaggaagagccagggcaacagaacaggctggccccggcagggactacttcgggtgccgccatgacaggctgtggccggaagaagaggctgggcgtcgccatgacagagagggactggaagacctaacggtgcctgcctccgctgccacgccggactgagaccggaaaagacaaggccggcaaggcgggcttgggcgccaccatgacaacctgaaccaaaaaaagcgagccctcctccttgactacaccagcaccacctgtcaccaggggcgaagcctggaccctgcggaggcggggtcgggagcttcggagttcaggaggcggggcccggtgcggggggcggggcttgtgaggggcggggtcggggaccgccccggaacacaaccacaccggacaagagccttaatgtgatagataagaattacaaatactagccgggcgcggtggctcacgcctgtaatcccaacactttgggaggcgaggcgggtggatcacctgagatcaggagttcaagacccaacatggtgaaaccacgtctctactaaaaatacaaaaattagccgggcgtggtggcacatgcctgtaatcccagctactcgggaggatgaggcaggagaattgcttgagcccgggagacggaggttgcagtgagccaagattgctccactgcacttcagcctggccaacagagcaagactgtctcaaaaaaaaaaaaaagaaaaatgaattacaaaaaccactttaggccgggcgcggtggctcacgcctgtaatcccagcactttgggaggccgaggtcaggagatcgagaccatcctggctaacgcggtgaaaccccgtctccactaaaaatacaaaaaaaaaaaaaaaattctccgggcgtggtggcgggcgcctgtagtcccagctactccggagcctgaggcagaatggcgcgaactggagaggcagagcttgcagtgagcggagattgtgccactgccctccagcctgggcgacagagcgagactctgtctccaaaaaaaaaaaaaaaaaaaaaaagaaattaccactttaacataaaaaatgaaaaactggtgtttacttgaaattatatacttctaggccgggcgcggtggctcacccctgtaattccagcactttgggaggccgaggcgggcggatcacgagttcaggagatcgagaccgtcctggctaacacagtgaaaccccgtctctactaaaaatacaaaaaattagccgggcgtggttgcaggcgcctgtagtcccagctactcgggaggctgaggcaggagaatggcctgaacctgggaggcggagcttgcagtgagccgagatcgcgccactgcactccagcctgggcgacagagcgagactctgtctgaaaaaaaaaaaaaaaagaaattatatagttctatattattaactgtactgttgcataaatgctatttgaacaaaaccacaataggactacttaacagtaccaattagtaggattaaacagtatgtgtgacaaacagtaactattttatgtttctttttgtcctctgatacagcaaatttatttaaacttaaaatttattggatatttaaattttgtagcttatattgttgcatattctttttttaatttttcgagatgaagtctcactctgtcgcccaggctggagtgcagtggcgcgatgtccgctcactgcaaactccactttccgagttcaatcgattctcccatttcagcctcccaagtaactgggattacaggcgcatgccaccgctccggctaatttttgtacttttttttttagacggagtctcactctgttgcccaggctggagtgcggtggtgcgatctcagctcactgcaacctacgcctcctgggttccagcggttctcctgcctcagcctcccgggtagctgggactacaggcgcgtgccaccatgcctggctaattttttgtattttcagtagagatggggtttcactatgttggccaggttggtctcgaactcctgaccttgtgatccgcccactttggtctcccaaagtgctaggattacaggtgtgagccagcgctcccagtctaatgttttgtgtttttagtagagacgggtttcgccatgttggccagtctggtctcaaactcatggcctctaatgatctggccgcctcagtctcccaaagtgctaggattacaggtgtgagccacggtgcccagtcctagtcttgttttgttttcttgggacggagtctcactcttgcccaagctggagtgcagtgttgcaatctaggctcactgcaacctctgcctcttgggttcaaatgattctcctgcctcagcctccttagtagctggaattacaggcatgaaccaccatgcctgctaatttttgtatttttaggagagacagggtttcaccatgttggccaggctggtctggaactcctgtcctggcctcaagagatctgcctgcctcgacttcccaaagtgctacaggtgtgacccgctgcggccacccactgcatattctggtttttttttttttttttttttttgagacggagtctcactctgttgtcaggctggaggctggagtgcagtggcgtgatctcagctcactgcaacctctgccctcggagttcaagcgattctcctgcctcagcctcccgagtagctgggattacaggcgcctgccactgcacccagctaattttttgtatttttagtagagacggggtttcaccttcttggccaggctgagtcttgaactcctgacctcgtaatccacccgcctcggactcccaaagtgctgggattacaggcgtgagccaccgggcccggctctggtttttttttttttttttttttttttttttttttttttttttttgagatggagtcatgctctgtcgcccaggcgcaatgctgtgatctcggctcactgcaacctcctcctcctgggttcaagcagttctcctgcctcagccttcttagtagctaggattacaggcatgcgccaccacacctggctaatttttgtaattttagtagagacggtgtttcaccatgttgggcaggctggtctcctactcctgacctcatgatccgcctgcctgggcctcccagagtgctgggattacaggctgagccaccgtgcccggctgcatattattaagatacatgacttcgtaaaaggagaaaggaaatgtaataggacttaataatcacatagtatcaaataagataatcttcagtaaaaataggaatgacatgtttctgtcccatgatacagttcgatatacttactttttcagttttttctccaatattaattctttcccatacaaggtccaagcttctgctcttggagtctgggactggacccctttctggtagcaatacctttatagaatgtttactccaggccgggcacggtggctcatgcctgtaatcccagcactttgggaggccaaggcgggcagatcacgagttcaggagatcgagaccatcctggctaacacggtgaaaccccgtctctactaaaaatacaaaaaaaaaaaaaaaaaaaaaaaattggccgggcatggtggcacatgcctgtagttccagctactcggactcgggaggctgaggcaagagaatctcttgaacctgggaggcagaggttgcaatgagctgagatcgtgccactgcactccagcctgggcgacagagccagactccgtctcaaaaaaaaagaaaaaaaaagtggtttactccagtttttccctgcatttaataattttgttccctttaaggcatgtttttattttcttggctgaaaaggagtagcctgagaagaagtaacgtgtaggaagccttggccatgggaccaatagcctcataaattcctgatctctggaggacatcagggcctcctacctgttccattgtgacctgggagtctctccagctccaaggtggagggatggcttcactgaacacggagtctggaattccgtgcacactcatgtgaccggtgttccggaaaaagaagcaggaggcggctgggcgcggtggctcacgcctgtaatcccagcactttgagaggccgaggccggcggatcacgagatcaggagttcgagaccagcctggccaacatggtgaaaccccatttctactaaaaatacaaaaattagccgggagtggtggtgggcgcctgtaatcgcagctacccgggaggctgaggcaggagaatcgcttgaaaccggaaagcggaggttgcagttagctgagatcgtgccattgcattccagcctgggcaacaagagcgaaactccgtctcaaaaaaaaaaaaaaaaagcagcaggaaggacccactgagtacaggaagccgacagggcctgctccggaaaaccaggagctgtaaggtcagccgaaaggacgaagagacctgaagtcagtcaagtaagttttattaacctgctgggctgctcccccacagttagaggaggcagccccgcttacagactacagcagggctttatagggcgaggaactgggctggggtgtgagaactgagtcgggggtgcaggtgtcctgaccgcatcctggagatgtttttgccagctttgttatgcaaggtgggcaggtgttgtgaccgcatcctggaactgtctgccggttcagctgaagtcttttgaacaaacagttactggaagggtcagtggggaggaggtctacttctagcccggggggagttgtgtggcggtcacaaaggactgtattgtaagactgatgggggaaggaggggaacagtctggttgggttgaccctaacgggagcaagttctgcttccatgcaagtccaggtccaaggtcccagcgaggggctgtgggtagcacctgtcagtcacaccccacacagcgagcggattatttgaggattccgatcacctctcctgtcgctcaagccccaggggcgggacctggggcaccagccagtcagaggcgctgtgcggcaaactgtccaatcaggtgcgccgggaggaggggcaacttccaaagcccgaagcggtctcatttcccgccggccccccattcgggtccgggttttagttcctcggggagcccctggtgccccggatacggctgattttgtcgtgtgggacctgttctggctgctccagccccaggaaggacccaggacacccggaagccggaaatggtgagcgtgcggagccgggcgtccggagacctgaggaggagctggtcggaaccggcagtggctggacctgggcctccccgcggcgactgtgggggtctgggacccgagtcccccaggcgcagctcgacccttggtcccctcggtcgccgggtggagctggaccagccgccgggaccccgggtgtcctgtcccggccccggagccctctcagggcagctccgcgcccgcagccccgcgtctccccagatcgtgcgggggcctcaggagggtcttagggggaatcccgcctcgggtgtggggttcgtgcgggaggagccgtggcctgtggggtccccagttcctcctcccttaggcggtccccgtttccttcggagtcttccaaaggtgtgggaagctgggtttcaaacccacgaccccgtcccccagcttcgctcctcccagggctgcagtaaatccctaaatttccccgcattccccaaccctaagttctccctccagtacatccacttcacattattattattatcattatttctattatttttgagacggagtctcactctgtcgcccaggctggagtgcagtggcactgtctgggctcactgcagcctccgtcttccgggttcaagtgattctcctgcctcagcctcctgagtagctggaattacaggtgcccgccaccacgtccggctaacttgtattttcagtagagacaggttcaccatgttggccgtgctgaagtcctgatctcaggtatctgcctgcctcggtctcccaaagtgctgggattacaggcttgagccactgcgcctggcaagacccagtgttttaactgtcatcttttccaaggagccctagatggcacttcttaaaaagttcattttccgtttgtgaacatttcacatgcgagcaaagcagaaaataaccccctgacactccgatgttaaaaaaaaaaaatcactgtgcctgccctctttttaccttccctaggcgcggccaccttatcagacagtctttgggtggaggcttctcttgggaacttcacagggtattgggtcctcagcccaccctcctatctttctggtcctgggtttcaggaccgtccagggacttcttccagctgccctcggaagaacgggtgaaaagtctgtcctggcgtggttaatctttcctggttgtttgatgagcctcctagggaggagttcttgtcttttgaaaagaagtttccttaggaaattccagagggattccctgctggcccttgggggtggggtggggccagaaacagtagaaagaaacttctcccttctgaggcagctcagggtggcatgcagtggcacagtcatggcttactacggcctcaacctctggggcccaagcaatcctcctgcctcagtcttccaagaagctgggaccacaggcatgcgccacgcccggctagtttttattttttgtagagacaaggtctcactatgttgcccagtctgctctggaagtcaaaagcgattctcctgcccaggtggctcacgcctgtaattccagcactttgggaggctggggcgggaagatctcttgagcccagaagtttgagaccatcctgggcaaagtggcgagaccccatttctacaacaaatacaaaaattagccgggtatggtggcgcatgcctgtagtctcagctactcaggagactgaggtgggagagccacctgaacccggggaggttgagactgccgttagctgtgattgcgccactgcactgaacgacagagtgagaccctgtctttaaaaaaaaaaaaggaaatcttccattatggctgcagaatatgaatacattcccacaaaaaaaaggcatggtaggtcgggcgcgatggctcacgcctgtaatcccaacactttgggaggcagaggcaggcagatcacgaggtcaggagatcgagaccatcctggctaacacggggaaaccccgtctctactaaaaatacaaaaaaattagccaggcgtggtggcgagcgcctgtagtcccagatattctggaggctgaggcaggagaatggcgtgaatccgggaggcggagcttgcagtgagctggagatcgcgccactgcactccagcctgcgcgacagagcgagactccatctcaaaaaatacataataaaaaaaggcatggtagataagcagaaattagtgatttacaaagattcaccagcacatcagctcctctcctttgcaggttggggaatttgtgatggtggataactctgttctgttttgtgttatctggatttgacagattaacgctgaatcctttgggataagtttggcaacatctagaagtagtcagatatgatcttttgtttactgaatagtttattatggaaaaaatactgaatgacatctgaaagtgatagatactcatctcttttcctaaggatactaatctgtactcctaggtctctctcatgatctcatgtaatcccagttatttcccagagttgctgcccgtaatattaataccatcaccttaggtgttaggattttttttttttttttgagacagagtcttgctctgtcgcccaggctggagtgcagtggcgcgatctcggctcactgcaagctccgcctcccgggttcacgccattctcctgcctctgcctcccgagtagctgggactacaggtgcccgccattacgcccggctaattttttgtatttttagtagagacggggtttcaccgtgttagccaggatggtctcgatctcctgacctcgtgatccgcccgcctcggcctcccaaagtgctgggattacaggcgtgagcccccgtgcccggcagatatttttcaacgtatgctttttacatcataatcattttattcacgagacattttcagacttcaagaaaaatttcagtaggctttgttcttttctaaaaattgacttcaacggcttgtaacagcaattcaagatgaactgagggcaggaacactggcaaacacctgtaattctaggtacttgagaggctgaggcgggagaatcgatttagcccaggagttcaagtccagcctgggcaatatagtgagacccccatcttaaaaaatgtgtgtgtgtatatatatatatatataaattatatgtatgattatatatatatttataagttgtatgattatatatatttataaattttatgtatgattatatatatatttataaatttatttattttatttttttactttcgagacaaagtcttgccctgttgcccaggctggagtgcaatggtacaatcttggctcactacaacctccgctaaagtgattctcctgcctcagccctcccccacgcccggtagctgaacccggtagctgaatcctgagtagctgggattacaggtgccctccaccacacctagctaattttttttagctttagtagagacagggtttcgccatgttggccaggctggtctcgaactcctgacctcatggtcctcctgcgtcggcctcccatagtgttgggattacaggcgtgaaccatcacattcagccctatatgcattttagaacgggctttttttttggcggggggggtctctgttgcccaggctggagtgcggtggcacgatctcagctcattgcaacctctgcctcccaggttcaaacgattttcctgcctcagcctcccaagtacctgggattacaggcacctgccaccacgcccagccaattttttgtatttttagtagacacggggtttcaacatgttggctaggccagtctgaaactcctgagctcaggcaatcctcccacttcgacctcccaaagtgttgggattataggcatgagccactgtgactggctggtatttttatttctgaaaaaagaaaacaaaacaaaaaaaaccagacatgggattttgatagggattgtattgaatttgcagatcattttgggtagtagtaccttccaaataatgtaaagtcttttttttttctttgacacagagtcttgctctatcacccagactggaatgcagtggcacggtcttgactcactgcaacctccacttcctggtttcaagccattctcctgcctcagccttctgagtagctgggactacaagcgcatgccaccacgcctggctaatttttttttttgtattcttagtagagatgggattttaccatgttggccaggctggtctcaaactcctgacctcaggtgatttgcctgccttggcctcccaaagtggtgggattacagatatgagccaatgtgctggctttttttttttttttttttgaattggagtcttgctctgtcgccgaggctggggttcagtggcatgatctcggctcactgcaacctccaccttctgggttcaagcagttcttctgtctcagtctccggagtagctgggattacaggcacgtgccaccacacctggctaatttttgtattttcagtagagacagggtttcatcatgttagccaggctggtcttgaactcctgaccttgtaatccacccacctcggcctcccaaagtgctagggttgcaggcatgagccaccgcacctggccaaataatgtaaagtcttcgaacacatgaacacaagatatttttcaatttgtctttaatttcattcagcaacattttgttgtttttagtgtacaagtagtctttcgacttcttggttttgtaatttctaagcgttcaattctttttttttttttttttttttttgagacagagtctcactctgtcgcccagtctgggctatttggtgtcctgggttttatatttgttgaggctttttaaattattattattattattattattttgagatggagtcttgctttgttgcccaggatggagtgcagtggtgcgatctcagctcactgcaacctctgtctcctgagttcaagcgattctcctgcctcagcctcccaagtagttgggattacaggtgcctgccaccgcgcccgactaatttttgtatttttagtagagacggggtttcaccatcttggccaggctggtcttgaactcctaaccttttgatccacctgcctttgcctcccaaagtgctgggattacagatgtgagtcaccgcgcctggcctattcaattctttttggtgctattgtttgtggtattgttttcttaatttctttttcacattattcagttttggtgcatataaatgtagctgacttttttggtcttgagacagtctacctctgttgcccagactggagtacaatggtgtgatctcagctcactgcaacctctgcctcctgggttcaagtgattctcctgccttagcctctcgagtagctgggactacaggtgtgggctaccacacctggctgattgtgtatttttagtagagatggggtttcaccatgctggtcaggctggtcttgaacttctcacctcaagtgatctactcgcctcgacctcccgaagtgctgggattacaggcgtgagccaccgcacccagccccattgtttttcatatttgaaccatccttgcattttgcggataaatctctcttgatgatgtcatataatcctttaaatatgctgtcaggtatgatttgctagcatttatttgaggattttttgcattgatattcataaagggcatttgtagttttgttttttgtagtgtctgtctttggtgtcagcataattttgacctcatagagggagtttggaaatgtcccctcttcagttttggaagagtttgaggaggattgatagcaattcttttttaaatttttggtggatttcagcagtgaaactatttggtgtcctgggttttgtattcgttgaggtttttaaaattattattattattattttgagatggagtctcgttttgtcgcccaggatggagtgcagtggcgccatctcggctcactgcaacctctgcctcccaggttcatgccattgtcctgcctcaacctccccagtagctgggactacaggtgcctgcctccatgccagcctacttttttgcgtttttagtagagacggggtttcaccgtgttagccaggatggtctcaatttcctgaccttgtgatccaccctcctctgcctcccaaagtgctgaggttacaggcatgagccaccgcgcccagccaatttattatttttcttaatttattttatttttttgagatggagtttcactcttgttgcccaggctggagtgtaatggcatgatctcggctcactgcaacctccgcctcccgggttcatgggattctcctgcctctgcctcccaagtagctgggattaccggcgtccaccaccatgcccaggtaattttttgtatttttagtagagacggagtttcaccatgttggctagcctgtctcgaactcctgacttaaggggatccacccaccttggcctcccaaagtgctgggattacaggcatgagccaccgtgcctggctattttttttttattactatgccaatctcctgctactacagctctgttcagattttttgttttttcatgactcagtcttggtatattgtgtatgtgtagacatttgtccacgtaatcagttatataatttactgaagtattctaaaggacttctgaaattaagcctgagttgtacagttttttgtcctctgctgtatgtatgtattctgctgctgttgctgtgagtgtaaggggtgaggtgaggggaatcattctattgacctatgacttagcctcatttaaagataataggccgggcacagtggcttatgcgtgtagtcccagcactttcagaggcgaaggtgggcagatcgctttagcccaggagtttgagaggagcctgggcaacacagggagagcctatctctacaaaaaatacaaaaattagctgggtgtggtggtgcccacctgtagtagggaacaaggtgggatgatcacttgagcctgggaggttaagactgcaggggccatgattgtaccactgcactctagtctggacaacagagtgagatcctatctcaaaaaatattatatcaatctttatttatttatttatttggagacaaagtgtcactctgtcacccaggctggagtgcagtaacacaatcctagctcactgcaaccttgaattcctgggctcaagcaatcctcctgccttaacttcccaagtagctaggaccacagacacctgctaacataccctgctaatgtttttaaaaaatttttctagaggtggctataacttttaatttttttgttttttgaggtggagtcttgctctgttgcccaggcccaccatgccaggctaatttttctatttttaatagagaccagttttcactatgtaggccaggctggtctttaactcctgacctcaagtggtccaccctactactctacatgcctgctctgttattaaccaagttttcatatgaatactggcccattgaagactcttctttttccttgatctatttgtttatctctctgctaatagtatgctgtcctgaatgtgatggtttggaaatctttggtgttaggtaagccatccacctgctattcagaaggctttgacaattattagatgttaattcctgcacaccaggtggtgggaggtttggaaaagtagcttttgtttacctaaaatgtctgttttggggatttttttttttttttgagacggcgtctcgctctgttgcccaggctggagtgcagtggcatgatctcagctgactgtaatctccgcttcctgggttcaagtgattcttctgtctcagcctcccaaatagctgggactacaggcatgcgccatcacgcctggctaattttttgtatttttagtagagatggggtttcaccatgttggccaggctggtctcaaactcctgtcctcaagtgatccacctgcctcggcctcccaaagtgctgggattacaggtgtgagtcaccacacccagctgtattgggtatttatgaaattttgtaaggatatcatttggaagaagggacatcttattgagttttttctaggaacacatgttatctttccacttactccatactgctttgacattacctgacagaaattttaaaattcttccattaggacaattaaatattgatcatgaatcttatttactacttgattaaatttggtctagagtaaactgcttgcaagcttcaggatattctctcttggtataaccacatgggatgagctcagttccccaggggacaagttgtgacaacacgtgtgacatattgtctcccaggaaagctcattaaagactctgtgcccagagtgtttttctggggctagtgccctaggcaccacttctagtttggaacaaaagagtaggctttcagaaggaaaacagttcagtcagtaccatcctgtttgtcaataccataaaccgtttagccacagtaagccactttgtcacttaagttgatgggatccctctcgtagtctaagttgaccccgatagtagcaaaggtcgaacttggtaaacaggcctttctaaggatacccagactcaggactgctgaaatgagcgctgtctgcacaccaggtggtgggagtttgttgtgacaggtactagagattcactctgcaaagagcatttggggcaacgcagcagcacaactgactccctggacccaccacagagagggtggtcctcctctgtggctggctctctgagtaggtcagttctcacactggaactgctgcgagggaggaagtgcgtgtagataggaggaggccgatgactcaatcatggagtgagtgtttggagagcccggcgtcatgggatcactcatgtattgagtagagatccccagtgctgagtctcacccctcctcctccacacctgtgggatgtttcaggactcagtggcctttgaggatgtggctgtgaacttcacccaggaggagtgggctttgctgagtccttcccagaagaatctctacagagatgtgacgctggaaaccttcaggaacctggcctcggtcggtaagaaggacatttccttccttagtcaattagaagacaagtgtgttttggtcaccagtgtggttgcacagtttggaatgtggaaagagaatacgttggtgaataaatggggcatcgtgggccaggtacagtggcttacccttgtaatcctagtgctttgggaagccacggtgggaagattgcttgcgtccaggagtttgagaccagcctgggcaacatgatgagaccctgtctctttaaaaaaaaaaaaaaaaagtggggggtgggcaattgtggcagctcatgcctataatcccagcactttgggataatgttgagataatgttgagaaatgcagaagtattgctgggtgtgatggctcctgcctgtaatcccagcactttgggaggctgaggcaggtggatcacctgaggtcaagagtttgagaccagcctggtcaacatggcgaaacctcatctctactaaaaatacaaaattagctgggtgtggtagtgcatacctgtaatcccagctactcgggaggctgaggcaggagaatcactagaactcaggaggcggaggctgcagtgagcagagattgcatcactgcactccagcctgggtggcagagtgagactttgtctccaaaaaaaaaaaaaaatcaggcattgtggcagtgtttaatgaacttagaacctagtgatttttctgtaattttaaataattcataataatttctctgggtctacattttaggaatccaatggaaagaccaggacattgagaatctgtaccaaaacctggggattaagctaaggtaatctccactcacaagaggaagcagtgtctcttgagggaatcttagtaggtcaggaaaatttttaaaaaaatacaagacaaataagtacaatgttaggtttttaactgattattagaagattgctaccaaaaatctatccttcaatgtaatgtagatgttgagtgtctggacagggtactaagaatctgtgacatggatgtcactgtttggataactgctatggggagctgggtagcagaatcatcaatacacttcctttctaataattctgacccaggagaaaacctccacttttcctgattttggtagcagcataagtcttaagacatgtcaattagtagaaaagcattaataaaccaagcattgataatgcgtttgtcatttttcatagaagtctggtggagagactctgtggacgtaaagaagggaatgaacacagagaaactttcagccagattcctgattgtcacctgaacaagaaaagtcaaactggagtgaaaccatgcaaatgcagcgtgtgtgggaaagtcttcctccgtcattcattcctggacaggcacatgagagctcatgctggacacaaacgatctgagtgtggtggggaatggagagagacgccccgtaaacagaaacaacatgggaaagcctccatttcccccagtagtggtgcacggcgcacagtaacaccaactcgaaagagaccttatgaatgcaaggtgtgcgggaaagcctttaattctcccaatttatttcaaatccatcaaagaactcacactggaaagaggtcctataaatgtagggaaatagtgagagccttcacagtttccagtttctttcgaaaacatggaaaaatgcatactggagaaaaacgctatgaatgtaaatactgtggaaaacctatcgattatcccagtttatttcaaattcatgttagaactcacactggagaaaaaccttacaaatgtaaacaatgtggtaaagccttcatttccgcaggttaccttcggacacatgaaatcagatctcacgcgctggagaaatcccaccaatgtcaggaatgtgggaaaaaactcagttgttccagttcccttcacagacatgaaagaactcatagtggaggaaaactctacgaatgtcaaaaatgtgccaaagtctttagatgtcccacgtcccttcaagcacatgaaagagctcacactggagaaagaccttatgaatgtaataaatgtggtaaaaccttcaattatcccagttgttttcgaagacataaaaaaactcatagtggagaaaagccatatgaatgtacaaggtgtggtaaagcctttgggtggtgcagttccctccgaagacatgaaatgactcacactggagaaaaaccctttgattgtaaacagtgtggtaaagtctttactttttcaaattaccttagacttcatgaaagaactcatttggccgggcgtagccagtgctttggcaggaggcagggggatcacctgagcccaggagtttgagaccagcctgggcaacataagaaggccccatatcggctgggtacggtggctcacgcttgtaatcccagcactttgggaggctgaggcgggtggatcacctgaggtcaggagttcaagactagcctggccaacatggtgaaaccccgtctctactaaaaatacaaaaaaattaactgggcatggtggtgggcacctgtaatctcagctactcgggaggccgaggcaggagaatcgcttgaacctgggaggtggaggttgcagtgagccgagatcacgccattgcactccagcctgggcgacaaaagtgagactccatcacacacacacacaaaaaagccccatatcacgtggtggctcatgcctgtaaaaccagcactttgggaagccgaggtgggtggatcacgaggtccagagatggagactatcttggccaacatggtgaaaccccgtctctactaaaaatacaaaaattagccaggcgtggtggtgtgtgcctgtagtcccagctactcgggaggctgaggcaggagaattgcttgaaccagggacttggaggttgcagtgagccgagatcgcgccgctgcactccagcctggtgacagagcgagacttcgtctcaaaacaaacaaaaaaaagaaggccccatatctccaaagaaaaaaaaaattaactgggtgaggtggtgcatccctgtagttctagctgctcagaaagctgaggtgggaggaacccttgagcctgggaggttgaggctgcagtgagctgagatcgtgccactacactccagcctggatgacggtgacactctgtctcagaaaaaaagggaaagaaataattctcatttatacaggagagaaatcctatgaatgtaaggaatatgggaatacattcagtttccaaagatatgaaaagactaactggaaaaaaatccaaagacctcagatattccagttctattcagagccataaaaggactcatactggagaaaaattgtagaaatgtacagaatatggggaaactctcattgctctcatctccattcaaagacacgtgtcagtgcacactggagatggatggtatgaatcgaagaatacacactggatggaaacgttagtagtttggaaaatacaggaaacttccattttaacaataattaaaattcacatgggctgtgcacagtggctctcccctgtaatcccagcattttgggaggctggggtgggtagattgcttgaggccaggtattcaagaccagcctggcaacctggagaaatcccatgtatacaaaaaatagaaaagttagccagggatgatggtgttcgcctgtagtcccagctactcaggaagctgaggtgggaggattgcttgagtttgggaggtcgaggttgcagtgagtggagattgcgccactggactccagcctgggcaacagtgagaccctgtctaaaaaaattaatcatgtgagaacatccactcgaaagaaatcctataaacgtaagtaattttgaaagcctgatgcaaattaattattatataatgctcaaaaacttaatcatgaatgagttattacacaaagttataaatatatagcatttatcagtggctcattcttttttctttcttttttttttttttttttgagatggagttttgccctgtcgcccaggctggagtgcagtggcacaatctcggctcactgcaacctccgcctcctgggtgtgagcaattttcctgcctcagcctcctgagtaactgggattataagcacatgccaccacgcctggctaatttttttgtatttttagtagagacggggcttcaccatgtggttcaggctggtctcagactcctgaccttgtgatccgccctccttggcctcccaaagtgctgagattacaggtgtgagccaccgcgcctggccttttttttttttcccgagacacagtctcactctgttgcccaggctagagtgcagtggcgcgatcttgactcactgtaacctctgacttctgggttcaagcaattctcctgcttcagtctccgaagcatctgggattacaggcgcacgccaccatgcccagctaaatttttggtatttttgtagaaacagggtttttccacattggccaggctggtcttgaactcctgacctcaaggaatccatcctcttcagcctcgcaaagtgctgagattataggcatgagacaccttgcccggcccctgtgactcattcttaaaaaggatctttggattatgggtttccacttttgcaaggaaatgtgagaatgatactctttaagcagtggtacctgaggtttaataggaagtgtttttatcctaagttagttaataaaatttttttctatccattttggttttcatttttttctatccattttaaagtgttggatctgtgggtgaagtgaaatttatttctaatatgtaagcaggtttaatttttatgtagtgtttaattgttctgtgatgaatgggccattacaaaatgagtctatttttgtttgttttcttttgtttttgagactgagtcttgctctgtcgccaggctgaagtgtagtggcgcgatcttggctcactgcaacctccacctcccgggttcaagtaatccccctgccttagcctcctacaggcgcgtgccgacatgcctggctaattttttgtattttagtagagacggggtttcattgtactggccaggatggtcttgatttcctgaccttgtgatccaccccaccttggcctcccaaagtgctgagattacaggagtgagccactgcgaccggcccatgagtctttattaatagagatttcttactggtgttatgtggcagattctgcatattcctcacccatcatatgtattccactttcctttattatggggaaaactactctttttggcatgatacaatgttgactccattttctttgctaataaggacttggtatcaatttatcagtatgtaaagtttaccatagagtattgtctcatgtgaatcattcccattttttgctctttactctttgtcgttatttctgagtattatttggatggttcattttgacttaaggatagccctgtgatatgacaatatttttatctaatctgatggagaaagcatttagtctcctgatcaagtatgatgttagctgcaggtttttaataaatgccttaattcagtttgaagaagttcccttctgttcattatttattgagtgtttcatcaagttgtattgaacttttttgcatctattgggatgatcccctttttttttttttggaaacaaagtttcacacttcttgcccaggctggagtgcagtggcacaatcttggctcactgcaacctccgcctcccaggttcaagtgattctcctgcctcagcctcccaagtagctgggattacaggtgccctccaccacgactggctaattttttgtatttttagtacaggtcaggtttcaccatgttggccaggctggtctcgaactcctgacctcaggtgatctgcccgcctcagcctcccaaagatcctgtggtgtttagtcagttttgcattgctgtaaagcaatgcctgacactgggtaatttgtaaagtagagatttcattggctcacgattctgcaggttatagaggaagcatggtatcacatctgctgggtttctggtgaggcctcagagctcttactcttggcagaaggtgaagtgggagtaggtatgtcacaaggcaagagtaggagcaagggagagagagggggaggtctcagactctcttgagtgagcattcactcatccctaagggatggtgctaggccattcatgacggatcagccccaatggtatgatacttcccactaggcccaacagccaacactggggatcacatttctttttttttttttttttttttttttttttgagatggaggtttgctctgtcgccgatgctggagtacaatggcgcgatcttggctcactgcaacctccacctcctgggttcaagtgagtctcctgtctcagcctcccaagtagctgggattacaggcacaccactacgcccagctaatttttgtatttttagtagagataggttttcaccatgttggtcagcctggtctcgatctcctgacctcgtgatccgcccgccttggccttccaaagtgttgggattacaggtgtgagccactgtgcccagcctggggaccacatttcaacaagagatttggagaggacacatctaagtcatataattccacccctatccctccaaatctcatattctcatattgcagaatacaataatcccttctcaatagtcacccagagtcttaactcattccagcattaactcaaaagtcaaaagtctcacatgagactcatgaaatgaaatgtccatattgtgggggtgggggggcgggacggagtaaaactgccgggcctttgtatgcaatcagttaagttgttattagcttaaaatagacttcgagagctaagattctttatgtaaccctcatggtagcccagaagagaaaacctatagcagatacgcaaaagagaaaggaatcaaagcagaaaatcattaactctcaaagagagacagaaagaggaagaaaggaacaaaggatctataaaacagtgagaaaacagttaaaatgggaatagtaagtcttaacctatcaacaattactttattttttattttattttattttattattttttgagacagagtctcactctgttgcctaggttggagtgcagtggctggcgcgatctcagctcactgcaacctccgcctccttggttcacgccattctcctgcctcagcctcctgagtagctgggattacaggtgcctaccaccacactgagctaatttttgtatttttagtagagacggggtttcaccttgttggccaggctgatctcgaactcctgacctcaggtgatctgcctgcttctgcctcccaaaatgctgggattacaagcgtgagccaccatgcctggcctctatttatttagagacaagttctcgctctgtcgcccaggctggagtgcagtggcatgatctcacctcactgcaacctctgcctcccaggttcaagcgattctcctgtctcagcctcctgagtagccggggttacaagcacatgccaccacacctggctaatttttgtatttttagtagagacagggttttaccatgttggccaggctggtcttgtgacctcaagtgatctgcctgcctcaacctcccaaagtgctgagattacaggtgtgagccaccatgcttggccaacaattactttaaatgtaaatggattaaatttccaatcaaaatatatagagtggctgaatagatttttaaaacacatgaaaaacactactgaactataagctacctacaagagactcccttcattattattattactattctttgacacagagtcttgctgtgtcgcccaggctggagtacactggcacgatcttggctaactgtaacctctgcttcctgggttcaagtgattcttctgcctcagcctcctgagtagctggaactacaggcatgcaccaccacgcccagctaatttttgtatttttagtagagacagtgtttcaccatgttggctaggctggtctcgaactcctgacctcatgatctgcctgcctcagcatcccaaagtgctaggattacaggtgtgagccacgactcccttcatttttattttttattttttgagacagagtcttgctctgtcgctcaggctggagtgcaatggtgcgatcttggctcactgcaaactctgcctcctgggttcaagggattctcctgccttaggctccagagtagctgggattacaggcgtgctccatcacacccggctaattttttgtatttttagtagaaacggggtttcaccatgttggccaggctggtttctaactcctgaccttgtgatccacccgcctcggcctccgaaagtgctgggatcataggcgtgagccactgcgctcggccacgactcccttcatttttaaggatatactggtcgggcgcagtggcttacactttgggaagccaagacaggcagatcacttgaccccaggaggtcgaggctgcagtgagctgtgattgtgccactgcgctcgagcctgggcaatggagaccctgcctcaaaaaaaaaaaaattgtatatgcaaacaatgtaatattccttagccttataaaaggacatccttttacatgctacaacatggatgaactttgaggacattatgcagaaataagccactcgcgaaaagacaaatactgtgtgatcctacacagatgatccatggaaaattgtcaaattcataaaatcagaaagtgaatgttagctgctagcaggtaaggaggagagggggaagtgaggagctgttattcagtgggtacagagtttcagttttgcaagatgaaaactttctggagattggttgcaaccccaggttagtatagttggtattactgatctgtacgcttaaaaatcattaaggactgggcatggtggctcacacctgcaattccagcactttgggaggctgaggcggccagatcacttgaggtcaggagttcgagaccagcctggcaagcatggcgaaaccctgtctctactaaaaatacaaaaattagccaggcgtcgtgacacatacctgtaatcccagctactagggaggctgaggcacgagaatcgcttgaacccaggagatgaagttggagtgagccgagatcgtgccactgcactccagcctgggacacagcaagactatgtctccaaaataaaacaaaataataaaaaatatataaaatggacatacacacatagcccttcagacaaacaaaatcacgaccttgtcactgcacatacagctgcagacacaaccaactcacaagccctccagagtaatgtcccagtgacaccaacggattcccccaggcaggcagagcccaggcccttggcactccatccctaccggcactccatccctactgctttccctccctcctggggactaaggcccacctgatacatttttaaatatatatatatataatatattttatttatattaaatattaatatatttttatttatattaatatataaataaattatatatttatctattacattaatatttatctattacattaatatatatttatctattacattaatatatatttatatattacattaatatatatttatatattacattaatatatatttatatataagttatatatttatatattaatatatttatatatgttatatatttatatattaatatatttatatataaatatataaaaattatatataatataatatataaatatattaatatatttttatatctaaatatatatttatatatataaataaattaatatatttatatacaaataaattatatatttatatacaaataaattatatatatatacaaataaattatatatatacaaataaattatatatttatattatatatttatatacaaataaattatatatttatatacaaataaattatatatatacatatttatatacaaataaattatatatatacaaataaattatatatttatatatacataaattatatatttatatataaatatattatttatatataaatttatatttttatatataaataatatatttatatttatatataaataaactatattatatatttatatataaataaattatatatttattatatatttatatataaactatatattatatatttatatataaactatatatttattatatatttatatataaactatatatttattatatatttatatataaactatatatttattatatatttatatataaactatatatttattatatatttatatataaactatatatttatgttatatatttatatataaactatatatttatgttatatatttatatataaactatatatttatgttatacatttatatataaactatatatttatgttatatatttttatataaactatatatttatgttatatatttttatataaattatatatttatgttatatatttatatataaattatatatttatgttatatatttatatataaattatatatttatgttatatatttttatataaattatatatttatgttatatatttttatataaattatatatttatgttatatatttttatataaattatatatttatgttatatatttttatataaattatatatttatgttatatatttatatataaattatatatttatgttatatatttatatataaataaattatatatttatgttatatatttatatataaataaattatatatttatgttatatatttatatataaattatatatttatgttatatataaataaattatttatttataaatatataaaattatttatatatttatatatataaattatttatatatttatatatataaataatttatatatttatatatataaataatttatatatttgttatatatttatatataaataaattatatatttgttatatatttatatatatttatacagaaatataatttaaaatatatatatttatatataaatatattttaaattatatttatatatttatatataaatataatttaaaatatatttatatataaatataatttaaaatatgtatttatatatatatattttttgagatggagtctcgctctgtcacccaggctggggtgcaatggcgcgatctcggctcactgcaatctctgcctcccgagttcaagcgattctcctgcctcagcctccagagtagctggggctacagctactcataaagttatgagacctcatatctttttttttttttttttttttttagatggagtctcactctgtcgcccaggctggagtgcaatggcatgatctcggctcactgcaacttccacctcccgggttcaagcaattcttgtgcctcagcttcctgagtagttggaattacaggcccctcccaccacgcccagttaatttatgtatttttagtagagatggggttttgccctgttggtcaggctggtctcaaactcctgacctcaggtgatctgcctgcctcggcctcccaaagtgctgggattacaggcataagccactgcgcctgtcccagagacccccatatcttaaaaaattaaattagctgggtgtggtggcgtgtgcctgtggcctctgaggcaggaggataacttgaggcctgaatttgtgactagcctgggcaatatagtgagacctggtctcttaaaaaaatactaaatctttatcatttacaaagaaatgggaactctgagaccccaccagtttaaataagtttacgtggcccaatgtaagttaaacagggtgttccaggattggaatttatttttaattttagagatggtctcactctatctggagtgtggtggcgtgatgatggctcactgtagccttaaactgggctcaagcgatcctccagcctcagacttccaagtaactgggaccacaggctctatcaaccacacttggctatctatctatctatcatctgtctatctgtctgtctgtctgtctatctatctgtcttatctatacagagtttcgctcttgttgcccaggctggagtgcaatggtgtgctctcagctcactgcaatctctacctcctgggttcaagcaattctcatgcctcagcctcccgagcagctggggttataggcttgagccaccactgcctgctaattttttgtatttttagtacagatggggtttgatatatgggttaggttggtctcgaactcctgtccttaagtgatccacctgccttggcctcctaaagtgtttggattacaggtggagccattgcacctggccagataaaagtttatactgctctttttctctctagttttttttttttttttttttttttctagacagagtttcactctttttgcccaggctggagtgcaatggcgtgatctcggctcaccacaacctccacctcccgggttcaagtgattctcctgcctcagcctcctgagtagctgggattacaggcatgtgccaccacgcccggctaattttgtatttttagtagagacgggggtttctccatgttggtcaggctggtctcgaactcctgacttcaggtgatccgcctgtcttggcctcccgaaggaccgagattacaggcatgagccaccacgcccggctttcttttttttttttttgagatggagtctcgccctgttgcccaggctggagtgcagtggtgcaatctcggctcactgcaaccgctgcctcctgggttcaagtggttctctgccccagcctcccgagtagctaggattacaggcacccgccaccacgcctggctaatttttgtatttttagtagagacggggtttcaccatgttggtctggctggtctctaactcttgaccttgtgatctgcctgcctcagcctctcaaagtgctgggattacaggcgtgagccaccacgcccgcccggccctctctagtttcttaaggtggaagattacattattattattattttttgaaacggagtcttggtctgtcacccaggctggagtgcagtggtgcgatctcggctcactgcaagctgcgcttctcaggttcacgccattctcctgcttcagcctcccgagtagctgggactacaggtgccagccaccacgcccggctaattttttgtatttttagtagagacggggtttctccgtgttagccaggacggtctcgatctcctgacctcgtgatcgcccgcctcggcctcccaaagtgctgggattacaggcgtgagccactgcgccagcccaagattacattactgatttaaatatttcttttctgatgtatatatccaatgctctaaatgtagctctaagcactgtttttgctatatcctccccacccccgctttttttttttttttttttttttgagatgcagtcttgctctgttgcccaggctggagtacagtggtgtgatctcggctcactgccacctctgcctcccgggttcaagcgattcttctgcctcagcctcctgagtagctgggattaccggcgtgcgcctccacacctggttaatttttttttttttgtatttttagtagagatggggtttcaccatgttggccaggctggtctcgaacccctgccctcaagtggtccacccacctcagcctcctaaagtgctgggattacaggcgtgagccacctcgtccagcatatcccacaattttttttttgagacagagtcttgcttaaagttcaaaatcagtaaactggacacacttaactactattattattttcaagacggagtatcgctgctctgttgcccaggctggagtgcagtggctcgatctcggctcactgcaacctctgacccccaagttcaagtgattctcgtgcctcagcctcctgtaatctcagctgcgattacaggcgtgtaatctgtgcctggcctcattcaaatcatgacctaccgcgcctggcccagctaaatttttttttgtttatttttttgtagagatggtctcctttgcccaggctggtctccaactcctggatgcaggccatcttcctgccttgacctcgcaaagtgctgggattgcaggtgtgcacctggcatggttatggtttaacattatgaatataattcatgccacagaatggtgcacttaaaatggataaaataaaattttgtatgaaaaaccctttagctctatgaaacacccagttaggctgggcacggtggctcatgcctgtaatctcagcactttgggaggccgaggtgggaggattatttgaggtcaggagttcgagaccagcctggccaacatggtgaaaccccatctctactaaaaatacaaaaattagccgggtgtggtggcgggcgactgtaatcccagctacttgggaggctgaggcaggagaattgcttcaacccaggaggtggaggttgcaatgagctgagattgcgcctctgcactccagcctgggaaacagagtgagactctgtctcaaaaaaaaaaaaaaaaaaaaaaggagaaaagaaacaaccagttaagatgatgaaataagctcctgagtgggaaactattttcaaactacacatacagcaaagaactactatcttgaatatataaaaaaactgtcacccttgtttagaaacacagacatctaacagtgatgtcaccgtatataataaagggattctaggtttgagccaccactcctgactcttaagagaattttgaaatgtaaaaagccatgatatctccaaggcaatcaaattcctattctcactggtatatttaagaaaaacaggtcacacgcatttgctcacatctgtgatcccagcactttgggaggccaatcgcttgagcccaggagttcaagaccagcctgggaaacatagtgaaatcccatctgtattaaaaataaaaaaattagcagggtgtggtcacctgcttctgtagtctcacctactcaggaggctaaggtgacaggattgcttgagccaggaggtgaaggctgcagtgggctatgattgagccattgcactccagccttggtgacagagtgagactgtcaccaaaaaaaaaaaaaaaaaaaaaaaaggctgggtgtggtggctcatgcctgtaatcccagtactttgggaggccgaggtgggcggatcacttgtgatcgggagtttgagaccagcctggccgatatatttggtgaaaccctgcttctactaaaaatacaaaagttagccgggcgtggtggtgcgcgcctgtaatcccagctactcaggaggctgaggcaggagaatcgcttgaacccgggaggtggagattgcagtgagccgagattgtgccactacactccagcctgggcgacacagcaagactctgtctcaaaagaaaaaaaagaaaaaaagaaaagaaaaaagaaaaacaaaaaaggggtacgtaaatttggcataaacctggaaactcaatactgttaaattggaccaaaactcctaatgaatttacttatttcaaccactttattcaaatatacatatcctacacaatacacccagttaaagtgcataattcataggtatagtatattcacagatacatgcaatcatcaccacagtggatttgcatcacctcaaagagaaacccctgtaccctttaggtatccactcccccaatcctcccattttttttactcaacacccagccctaggcagtcagcaattgactttctttctcagcagatttctctgctctggactttcatgtgaatgaaatcataccatacggggaatttttaactgggtttcatttactatagttttttgaagggatatccatgttgtagtatggtcctgtacatcatttagatttatgatggaattattaatattttccattgtctggctattacatattttatccatgcattcaatgatggattatttggtttccaccttttggctgtcatgaataacactgctataaacattcatgcccaaggtcttgtgtggacatatgtttctatttatttctacctacaacaaaaactgatgtcacatggaaattctgtttagtagtttcttttaaatttaaaaggtttgaagatttattatttttttcttgtggcaaaaactcttaagattaaatataacggctgggcatggtggctcacgtctatcccagcactttgggaggctgaggcaggtgggtcacctgaggtcaggagttcgagaccagcctggtcaacatggcgaaaccccatctctactaaaaatacaaaaattagttgggcatggcggtgtgtgcctgtaattccagctacttgggaggctgaggcatgagaattgcttgaatctgggaggcggagtttgtagtgagccaagatcatgccactgcactccagcctgagcaacaagagcaaaactctgtctgaaaaaaaaattaaatataccaagttaaccccaagtgtataggtcagcagtgttaaatctattcacactgttgggcaacagatcttcagaccttttcaatcttgcaaaacctaaaatctatatccattaaacactacttccaactgcccaccaccccagccccattctacagcccccattctcagcaacaaccttgctgcactgtttctgcattttgactacttcagctagtccatatgaatggaatcctacagtatttattgtttgatgactgcctcatttcactcagcctaatgtcctcagggttcatcggtgtcgtaccaactgacaaagtttctttctcttctctttgagatcttgttgtgaaatctctgggatatacacccagaagtggaattactggatcatatggtcataccatttttcttttttttatttatttttagatggagtctcactctgtctccaggctggagtgcagtggcatgatctcggctcactgcaacctccatctcctgggttcaagccattctcctgcctcagcctcctgagtagctggaattataggtgcgcaccaccacgcccagctaatttttgtatttttagtagagatggggtttcaccatgttggccaggatggtctcgatttcctgacctcgtgatccacccgccttggcctcctaaagtgctgggattacaggtgtgagccaccatgcctggccttcatttttttacaacctgttcttcacaatgctgtttttcataatggctacaccactttacaatcccaccatcaatgcataagcaccccaatatctctatgtcttcaccaaaactttttatttatttatgtattatttattgagatggagtcttgctctgttgcccaggctggagtgcagtggcatgatcgcagctcactgcaactgccgcctcctgggttcaagtgattctcctgcctcagtccccggagtagctgggattacaggcatgtgccaccatgcccagctaatttttgtttcaccatgttggtcaagctggtctcgaactcctgacctcgtgatccgcctgcctcggcctcccaaagtgctgggattacaggcatgagccaccgcacctggccggctattctttttttaaattattattattattattattattattattattattattatagttctggcctgctattctgatgttcgccattctaattggtgtgaggaaatatctcattatgtgctttttttttttttttaagacagagtttcttgttgcccaggctggagtgcagtggcgtgatctcagctcactgcaacctacgcctcctggttcaagcgattctcctgcctcagcctccccagcagctaggattacaagcatgtactaccatgcccagctaattttgtatttttagtagagacagggtttcaccatgttggccaggctggtttcaaactgctgacctcggatgacccacctgcctcggccttccaaagtgctgagattacaggcgtcagccaccatgcccgacctcattatgcttttaatttgcacttctcttatgatctctgatggtgagtgtgtgtgtacagatatttcaatggcatccttttgtattttgcaaaaacagggagtatatatatactatttttgcaaaatagcagttgaaattttggtgcagattgtattaaatctgtagaccactttgggtagtggagacatcttaacaatattaagtcatctgggctggatgcagtggctcacgcctgtaatcccagcactttgggaggccaaggccagtagatcacttgaggccagtttgagactagcctggccaacatggcaaaaccctgtctctattaaaaatacaaaaattagccagatgtggtggtgcatgcctgtaatcccagctactcaggaggctgaggcaggagaattggttgaacccaggaggctgaggttgcagtgagccgagatcgtgccactgcactctagcctgggagacacagtgagactgtctcaaaaaacaaaaaaacaatataaagtcatctgatctatgagcatggaattctctgagaatacagaaaaacacaatagttctttttcttattctcaaacaataacatgcaacacttctgcgaccagatgtgggggctctttccacacacaccaagcaagcaagtctgcagagcattcctctccagcagacaccaggaggctgccccctaactgaactaaattctgatgctacttggagatagcatcagattccacaggttcaggtcccagtgccataagactgccctcacctcacgtgccagttaattaattaattaatttttttgagatggagtcttgctctgtcaccaggctggagtgcagtggtgcgatcttggctcactgcaacctccacctcccacgttcaagccattctcctgcctcagcctcccgagtggctgagactacaggtgcctgccaccacgcctggctaatttttgtatttttagtagggtcagggtttcactgtgttggccaggatggtctcgatctcttgaccttctgatacacctgcctcggctgcccaaagtgctgggattacaggcgtgagccaccgcgcccagcctggaattcttaacaggaccattaggattaaataaattttactgggggtctgaagaaatgatgtaatcaagcgcccggcttgattacatcattggatattggtgatagacttaaacttcagcacctctctcctccaggtgaggcagggaacttaaggccaatttgtgctgacttcctaaagctgggtcaaaggaaaacaccaaggtcttggggcagagaatctaaggccaattaacgccaactgcctaaagctaaaccaaaagaaaaaaccccatctccccaagcctggagcagcaaaggatggaaggctactttccctccagccctcccacttccaccaacatctcagatggaaagtgccctggattggctgcgggccaagcatggcccatcccttcatcttcagagggcaccaattcacctcagcctttaattagccaccagccaaatccttcatccagataaggggtaactgatggggaccttgaaaggagtacttaaaacccagaaaactttgtaactggtcccttgagctgcttgctcgggctcacttccaccctgtaatgtgctttctccctttaataaatccttgcatttgcggcttcggtcctgggtttcgttcctttgtgtgttttcttcagttctttgttcaaaaactccaaggacctggacaactcacactcatggccttccttccagtaacacaggggagtcaggggtgaagcagagtatcctaaccatctaatcacatggttgtttcccctggcaaccaccccatcctgaggctatgcacggcccgcagtcactagtcacctcaacatcactttgattccaaggcttttaggagctgtaggccaaggaaacaggaacaaaccaaaataaatatttcataatatcacagatgtctttctaggtatttgtatctttctttcttttttttttttttgagatggagtttccctcttgtcgtccaggctggagtgcagtggtgtggtcttgtctcactgcaacctcttcctcctgggttgaagtgattctcctgcctcagcctcctgagtagctgggactacatgcacgcaccaccacgcccggctgatttttgtatttttggtagagacggggtttcaccattattggccaggctggtctcaaactcctgacctcaggtgatccacctgcctcggcctcccaaagtgctgagattacaggtgtgagccactgcgcccagcctctttagtttcttttagcaatgctttgtagctttcagtgtagaagtcttttattttcttggttacatttattctcaagtatttgtttttgtgccattgtaaatgggattgttttcttaattttcttttctgcctggtcaccactagtgtgtagaaacacaattcattattatttttcttgctgattttgtttttttcgcctttgctgaaatcccatagagtcagccctccatattcctgggttctgcatctatggattcaaccagctacgaattgaaaatattcagaaaaaaattggatggctgtgtctgtaatgaatatgtgcttttttcccccttattatctcctaaatgacttattataaaaactatttacacagcagttgcattgtattaggtattataaataacctacagatgatttaaagtatataggaagatgagtgtaggttatgagaaaagaacttttatctgaagaatgtgagactgtggcaggccaggtctcactaacgcaggcctccataacaactgtttcagtactgactgagtggttaagttaaatattaaaagccagcgcccttacataagggctgggatgtaacaaaagcccaccaaaaagtttctcctaggcctgcctttcttgggctttaatgcatgacaacaataatgaaggaatttttttttttgagatggagtctcactctgttgcccagctgcgatctcggctcactgcaacctctgcctcccaggttcaagcaattctcccgcctcagcctcctgagtagctgagactacaggtgcccgccaccccacccggctaattttttgtatttttagtagagatggggtttcaccgtgttagccaggatagtctcgatctcctgacctcgtgatccgcccgcctcggcctcccaaagtgctgagattacaggggttagccaccatgcctggccaagaagttgttttatcttgtttactgctgaaggtgtcagggtaaggggggcccaggtgggctgaagtttcctcttgctcacagcgcagacagttgcccggactaaggaagccgacatctttgctgtcctggcgctccggtacctccagccagagctcggccgcctcagcctctctccatggacatggcgggcgcatccagttcaaagaatttttaaatttccatcttgatttcatccaacgctcatccagaaacaggttgatctttaatttttaatttaatttccatgtatttaatttctaaaatttatttaatttccatgtatttgcatggttttgatggttcatttggagttgattttcacttttattccactgtagtctgagaaaatagttgatataattttgattgtcttaaatttattgagacttgtggcctatcatatgtctatcttggaaaatgtttcaagtgctgatgaataaaatgtatattctgcagttcttaggtagaatttctgtaaatattttttaactccatttgttctaggatatagttctaagtccattttttgttgttgttgttgttattattgactttctgtcctgatgacttgtctattgctgtcagtagagtattgaagtccctcattattattgtgttgtcatctatttcatttcttaggtctagtagtaattattttataaatttgggagctccagtgttaggtgcatgtatatttaggattgtgatatttccctgttggactagtcctcttatcattatataatgtccctcgttgtctttttttttttttaactgtttttgttttaaagtctgttttgtctgatgtaagaatggctactactgctagcttttggggtacatttgcatggaatacctttttccaaccctttgccttaagtttaagtgagtccttatgtgttgggtgagtctcttgaagacagcagatatttggcttgtaaaatcttttttttgagttggagtttagttctagtccaggttggagtgcaatggcgtgatctccgctcactgcaacctccgcctcccgggttcaagcgattctgttacctcagcctcctgagtagctgggattacaggcattcaccaccatgtctggctaatttttttgtatttttagtagagacagggtttccccatgttggtcaggccggtctcaaactcccaacctcaggtgatccgcccacctcagcctcccaaagtgctgggattacaggcatgagccactgcacctggtctggtaaactcttatccattctgccattttgtgtcttttaagtggagcatttaggccactagattagtagcatttaggccaataatcactatcaattacaccaccatacattacaatgcctgtcattgaaaggcttgaacacgttgtaatccattcatctgtattcaagtttgcagttatggtggaaactttggcctattgatcatcctgctgattaaatagtctgtcaagagaaagcagagatgcatgagcatcaacatggaaaacagtgataatggtagtgtgtgccaggattcagatatcttcccagtattgttttccccaaacctctttattcccaactaaccatttgttttgttaccactggggtttccaggtagtaagaccatttgctactgaccaagagttggtatacaagtgacaaatccttctggcctcctcttgaatagctcggaggatggctactagttcagctaactggctgttcccacccctttcttcatcagaaatgtttatgtttttaacaggattataagccatggccttctagtatctggtcccaccaatgtatttggtggatccatccataaaccaagcatgtttctgatcctctgggcatagttctttgaaggatctgccccattgggcaggggaggtttccttccctatctgcaggacttgctcggtgatttcctgagctgggaagtttcgtacatcctcatgtaaaagtgataccctctttggttttggtttagatgggggacttgtatatcacaagtagctgtaaattaaccgctaatgctgcaccagacactataacccatgtcctatagcttaacaatggatagccaattactaatcaatgtcatttctgtaagccaatgagaattcctgacgactttataccagccactccctgtaccccattttgcctttaaaaacctgcttgtggccaggtgtggtggctcatgcctgtaatcccagcactttgggaggcagaggcatgcagatcacttgaggtcagaagtttgagaccagcctagccaacacggtgaaaccctgtctttactaaaaatacaaaaattacccgggtgtggtggcaggtgcctgaaatcccagctactcaggaggctgaggtgggggaatcgcttatacccaggaggtggaggttgcagtgagccatgattgcaccactgcactccagtctgggtgatagagtaagactctgtcgcaaaaaaaaaccaaaaaccaaaaaacaaaaaacaaaacacacgcctgcttgtgacaaaggcggaacggagttcatatccaaggtcacttgggtccgagtctcccaggaagctgttctctctttggctccagtaaacttgttaaattatacttgtgcctcagcctctttcttttaggttggaattttttttttttttttgagacggagtcttgctctgtcacccaggctggagtgcagtagcatgatctcagctaactgcaacctctgcctcctgggttcaagtgattctcttgccttagccttctgagtagctgggattacaggcacatgccaccacacctggctaatgtttctatttttagtagagatggggtttcaccatgttggtcatgctgatctcaaactcctgacctcatgaaccgcccgcctcggcctcccaaagtgttgggattacaggtgtgagccaccacgcctggccttaggttgacatttctataaaaatactgtgccattttatataagggccttgagtttccataaattttggtaccaaggggcacaatggagccagttccccagggatactgaagaactacattaattttaagttttaaaaatggaatctttcttttttctttagacagggtgtcgctctgtcacccaggctggagtgcagtggagcaatcttggcccactgcaacctctgcctctgggcctcaagcgatcctcctgcctcagcctcccaagtagctgggactacaggtgtgagccacgacacttggttgatttttgtatttgtgtgtgtgtgtgtgtgtgtgtgtgtgtgtatatgtatagttttttttttttttgtaactgtctctgttggccaggctggagtacagtggtacaatctcggttcactgcaacctctgcctcccgggttcatgcaattctcatgtctcagctttcctgagtagctgggactataggtgcgtgccaccacgcccagctaatttttgtattattagtagaggtggggtttcagcatgtgggccaggctagtctcaaactcctgacctcaagtgatctacccacctcggcctcccaaagtgctgggattacaggtgtgagccactgtgcttggccaagttttgtattttttgtagagatagggtttcaccatgttgcccaggctggtcttgaactcctaaactcaagcaatttgccctcctcggcctcccaaagtgctgggattataggcatgagccaccatgactggcctaaaaatggaatctttagggatttcttcacagggatcttgccattaacaaaaagagataattttacgtattcctgtccaatatggatgccttttttttttttaatcatctaattggtctgcgagggccggtggtatgtccaacaggagtgtccttttaaagttttgtcttttactgctgagtatggtgttagctgtgttttcaaatacggcttttattatgttgagtatttttcttctattcctagtttgttaggttgttctttttttaatcaagaaaggggtgttgaattttgtcagacgcttttagtatacattcagtttccaaatggctcaaattatggacttttgtttcaggtttttttgttggaataaagaaaacaaaaatctatcttccttccttcactgtggtttttttttttttttttgagatggagtttcgcccttgttgcccaggctggagtgcaatggtgcgatcttggctcactgcaacctctgcctcccaggttcaagcgattctcctggctcagcctccctagcagctgggattataggcacccgccaccaggcccagctaatttttttgtattttcagtagagacggtgtttcggtatgttggccaggctgatctcgaactcctgacctcagacgatccacccacctcagcctcccaaagtgctgggattacaggcgtgttgcaccgcgcccggctctccttcactttttgttttctgctcactggaaatactctggggaggggagggccctctctactacagcatgtgttattttttttcctccagagatcttcaaataactactatcagttaggggcctcctgcatggtgagagatgctttgtgtggtttaaggacacaaggctttatttaggtctgaactaacatctttgctgaactaaaggatgccatgagggttatttctgacaaccttggaggatctgggtctttgttgcgttagaggcgtgagcagcaacagcagcagcagaggtatttaagggtcctggagagtgtggacctcaagacaccatctaatagcagcttcccagtccccactctttttgttctttctgtttttcagatgactactttttcaggaatgactacttgatgggcccacaacttgcacagaagaaaaaaaatctccccaccagcctgcaccctagatgaaggccaatacccagcattagtcacagcttcattctaaaatacacagccacagctaggccgggtgcagtggctcacacctataatcccagaattctgggaggccgaggcggatggatcacttcaggtcataagttcgagaccagcctggccaacatgatgaaaccccatctctactaaaaatacaaaaattagctgggtgtggtggcatgctcctgtaatccctgctatttgggaggctgaggcaggagaatcacttgaacctgggaggcagaggttgcagtaagccaagaacccgccactgcactccagcctgggcgacacagtgagactctgtctagaaaaacaaaaactaaaacaaaaacaaaaaaaccacagctaggtcccagccaaaacatatgacccaggactgtgtaagaggggctgcaatcagctgggtgcagtggctcacacctgtaatcccagcactttgggaggccaaggcaggtggatcacctgaggttgggagttcgagatcagcctgaccaacatggagaaaccccgtctctactaaaaatacaaaaaattagccaggcatggtggcacttgcctgtaattccagctacttgagaggctgaggcaggagaatcgcttgaacccgggaggcggaggttgtggtgagcggagatcgtgccattgcactccagcctgggcaacaagagcgaaactccatctcaaaaaaaaaaaaaggggtggggggtgctgcaatcccatacttctgctcctcaatgtaaaggaattatgcaaactgctgacttacctcagctgaatccggaactgaggctggctaggcctcagcaatgcaacacagggcagcaagcagcagctcaaagtacacactggctgctgggcagcagagcaggttagcaacctggacgagagaacagacctgtggcgtggtgaccagcatccagacatcttgttcatggtgacaactgccagtgtcacctgaaaacgtggttctgatgttgacacgcagaacatgtggttctatgtggcagaaacatagtgagtgagtataaaaaggcttattacataattgaggtctcagggcaggactcacaagcagctgtgaaatggcttgacagcaaggaagattgcattaattcctactgtgaatggtgatgcaggaatcctgaaataaacaccagcaaaccataggaagcaacatattaaaagcattacataacatagccaagtgagatttattcttggaacataaaaatggttgaaaatatgaacactgatcattgtcatataccacattagcaaaatgatggaaaatgacaattatctcaattgatgccatatatgaaaaacccacatcattttgatggtgaaaaactggatcaggaaaaaaaggatgtatgcactaacaggttgttgttgttgctgttgttttttgagacggagttctcactctgttgtccaggctggagtgcagtgtcaccatctcagttcactgcagcctccacctcccagaggttcaggtgattctcctgtcccagcctcccaagtagctgggactacaggcagatgccaccgcacccagctaatttttgtatttttagtagagacggggtttcaccatgttggtcaggctggtctcaaactcctggactcaagtggtctgcccgcttggccgcccaaagtgctgagattacaggcgtgagctactgcgcccggccctaactagttttactctatgtgttaagggagatgctgtcagggaaatcaggcaagaaaatgaagtgaaagcaatctagattaaaaaatatacacacacagcccccacagcctcccagaccaacaagagatcataaccattttcactgtacacacaggtggacacacccagagacagacacataaactcacaaactcacagataaaaatggcccagagataccaacagatgcttgcagagacacacagaccccaggcctgccccctctactccaggtttctctccttcctgaggaataaccactatgatctactgtatatttttgcttattctcatgttctcttctagaatgtcaggttggaggagacagggatattagtgtagatttgttcattacaccaactagagaacctgttatatcaaggagattaatacttattgaatcggccaggtgtggtggctcatgcctgtaatcccagcactttgggaggtgggcggatcacctgaggtcaggagtttgagaccagcctggccaacatggtgaaaccccatctctacgaaaaatataaaaattagtcgggcatggtggtgcaatcccagcactttgggaggtgggtggatcacctgaggtcaggagtttgagaccagcctggccaacatgatgaaaccccatctctactaaaaatataaaaattagtcaggcgtggtggagtagtaatcccagctactccagaggctgaggcagaagaattgcttgaacccgggaggcagaggttgcagtgagccaagaccatgccattgcattccagcctgggcaacaagagcgaaactctgtctcaaaaaaacaaaacaaaacaaaaaaacacttattgaattgtaggactcaaacagacacacaaacaggttttacacaaacctcgccataagctcacatacacttaatcttcaaagactgaattgttctcacccacatcccatgtggcagagaggtgcttccggcccccaagcctctcacaaaaagtggctccttagcccatgctgatggggaagacattttacaatacttgagcatatagactctaagaagtgcttttctgtaaaagtagaaaatgggagttcaaggatgcaaaagggctggaaatggattgatgctgctgctccagcccttcaactgttataaattgtagatgattccagaaacatccctcatgacttgaccgtgtgtcagtttgcttttccactgagagcacaatgagggcagcaaaggcgtggatctcatggctcagctgcatgccctcctctgagctcttcctggtagctctcaccttcactaagggctcatctgccagcagacctcgccccagatggcctcacgggaccccaccatgctcaagccttgcaaggctgccccctgacccacatctgctgttggggtaggatggaggcctacaaaactcagactaaacatcttgaattgacagaaatatcacttctggtatccagggagagacaggaagttgttgtgaggttggatggtgagctggcttccctcattcctgccacatccctggcaggacactctgacttgctatccaggtaacagtgggcactgcctccaccaaaggaagggcctgacacctaccatggctgcacagctcagcaaaggaggaactcttcggtgctgtcaggacagtttcttgggagttcagtacaccttgcattctgggagtgacatgaagcgagtcggctccatggccggtgccgcctctctgatatagcggcttcccgtataccacaaggctggagttctgcagggtgggttctgttccacgaagcactaagtgctggccttggaggcaaggctacgaaaccagccctgcagcagcacacgtgacacgcactgaggagaaaccttgtcattgtcagtgcctaagccaggtggaatgtgccagaaaatctggggtgggcaaattagggaaggtaagaagttgatcgtgtcctgcagtctatggccatactaccctgaacgtgcctgatctcgtctgactgtgttctgtagctgggacatggtagggcatgtctctatgatgccacagttggttttgagacttctgtggtggttggtgcagagctggtggttatgggacagtggatcttgtatggtcaaggggcatgacacacattctgccacagcttcttcagccctcactttagagctacctgggttgtcacagaaaaatggtctagtgtgaacttttatttatttatttattttttttctctttttcttttttttttgagacagggtctgtctctgtcacccaggctggagtgcagaggtgtgatcttggctcactgcagcctccgcctcctgggttcaagtgattcttctgcctcagcctcatgagtagctgggataacaggcacgtgccatcacacctcgctagttttttgtatttttagcagagatggagtttcaccgcattagccaggatggtctcaatctcccgacctcatgagctgcccacctcgacctcccaaagtgctgggattacaggtatgagccaccgtgcccggccttagtgtgaacttttaaatgcatttaccaacaagaatccacagtgtgggtttggatgggaaacggagctggacatgacctccagacggccttggaataacatgatgttgacagccatgaattagggtgtccacaggcagatcccactggagaactgtgggatgtacctttgttttcagaaccacagcatccccaaagatctgacccaaggacactgatgaaaagttcaaaggcagattgtgggagccctctcaattctgtgcagtcacgtacgtaagctaagggctgggagtgtttcttaacttcagacggggttccaagaaaggcctgttgggacccaagtcctttctcctcagtccttcaatttgtcctaaggcagtggaaagggttgcatatgtacttgaagacatttccatattgcttacattcaagaagctgctcttaaatgtgtgcatggtttcatggtctcaaaatgaactaggatgcacaagaaactcagaaatgacagaaaagttaaatgaatatgaaactgaagagtttagattccacggatatttaaaaaccagtcaacttgaaatggatattcagattaaaaagataaaacataagactgataatcttatagcagaactggaaggtgcatcttcaaaatgtctgtatctggctgaaaacaatcaagttcttcaacaggaattattatctatgaaaacgatacaacagaaatgtaaagaatttgagaagaataaaaaggtgttggaacaagaagtgagaggagttagctagcttgcctcaggtaaacagcaagggaagggtttttggagagcccccgacccactggttagtgccttattcccacatataacaaggtctctgattggattaaaaaataataataattagcacagggagtcatgcctagagatatgcccacagctgcacagatagaacttttagcccactcagataaggaaacttgcacaaacctttagcccacttaaataaaggaacaaggcccaacatagaaatgccttagtcctttgtataattagtgggcttccaggaaatagcctctactccttttatgggcatatacctggtgggctctggtgggttctggtgggcacttcctttttttaaacattctttagcctctatgaatcatcacttcagcctctgattggtcccaggccaaggtcctgggccaggctgaatcatgctttgccaagacagccttcagactagtcagcacatttcttcccctttccagtctataaaaatcccagacccagcctcatagtgggcaacccatttgggctccactctctgctgcacagagctttctttttttgcttattaaacttttgctccaatctcacccttgtgtctgcattccttaatcttcttggaagtaagacaaataactccacatagtacctcagaaaacaaaaaactgctacactgtggtgcattggcaagcctgtaacagaagtagtaaatctaaaaagtcatatggaaatgaacgtgctatagaatatgtagagaagtttaaatgagagattgaagaaagagcaagacaagaaagagaaaaattagaagtccatctacagaacgaatgagataccagcagcagtgtgcaccaagcttctacagacaaagtgcgtcaaatgtttactctccatttttactacaaggccagtccaagagttaccttgtgttgaaaatcttaatagtgtaggtctcaacagaggacatattatgagagaaaacttaaggatccctacctcatacccagagacctcaaatagcagcatgaactactcaaccaagactcagccagattggatagaaaaaaataactacagaagtaaaaaatgctgttgctgaattggaaattagctctcatatggtttcttctgtagaatccactgaagaatgagtcacatctaaatcaatatgtcctttggaaagcataatgagaatatgttccagttttaaagaaaaatgttataatttataagattgtaaaattttattactgggctgtttacatgatactttctttcttattaaatataacctgacaatctttattaaatgaaaatatttttgtatcatcaacaacaacaaaagaactaggatgaagaatttcccacattcttaatatttatagggtttctctccagtatacattctcatgtgtgctcaaaaggctgtgtgaaggctttcccaaatgtcttacatttatagactttcaccccactctgactcctttcatatattcacactctagaggacagttggaagattttcccacttttattttttcttgagacagtgtctcattctgtcgcacaggctggaatgcagtggcgtgatctcagctcactgcaacctctgtctccaggttcaagtgattctcctgccttagcctcctgagtagctgggattagaggcatgcactaccatgcctggttcattttttggtaatttttagtagagatggggttacaccatgttgaccacgctggtctcgaatttctgacctcaaatgatctgcctgccttgcaccttggcctcccaaagtgctgggactataggcatgagccaacaagcttggccttttttaaaaaaacaaaaaacaaaaaacaaaacagatttcactgcagcacgagtcctgtctttgaaatgaattaggtcaactgaaggcttaatcacaatgtttacattcatactgtttctcaccagtgggaattctttcgtgctcaaaagaaactggaacaattaagggctttagaacaatgtttgtattcacacagcttctgtccagtatgaactcttttgtgtattcagaaggagctggaacaaccgaaggcttcagaatgttgcttatattcttagactttctctcccatatgagtcctttcatgcagtcgaaagtgactggaagaaatgaaggcttttccacattgtttgcattcataaggtttctctccagtgtgagacctttcatgaattcgaacagaacttgaaaatctgaaggctttcccacattgtttacatcgatagggtttctctcccgtgtgagttctctcatgcattcgaaatttactggaagaaatgaaggcttttccacattgtttacattgatacggtttctctccagtgtgagtcctttcatgcaatcgaatttgactggaacgaaggaaggccttaccacattgcttacactcaaaaggcttatttccagtgtgaattttttcatgttctcgaagggaacttgaaaaactgaaggttttaccgcatagtttacattcatagggtttctctccagtgtgtgttctttcatgcagtcgaaaggaactggaacgaatgaaaacttttccacactgtttacattcatagggtttctctccagtgtgtgacctttcatgaattcgaaaataacttgaacacctgaaggctttcccacactgtttacattcatagggtttctctgcattgtgagtcctttcatgtctttgaagggaacttgaaaaactgaaggttttaccacattgtttacattcatagggtttctctccagtgtgagttgtttcgtgttctcgaagggaacttgaaaaactgaaggttttatgacactgtttacactcataaggtttctctccagtatgagttctttcatgcaatcgaagagaaatggaccaactgaatgatttgccacatcgtttacattcatatggtttttctccaatatgagttctttcatgcactcgacaggaattagaagagttgaaggctttcccacattctttacatttataaggtcgagccccagtgtgtattattacatgtgctcgaaagcttgcagaataaaagaaggcttttccacattctttacattcatagggtttctctccactatgagtccttttatgccttcgaaaagaactgagaaaactgaaggctttaccacattctttacatttgtagggtttttctccagtgtgagttctttcatgagttcgaaagtatgtgggacaactgaaagccttaccacattgcttacattcatagggtttctctccagtgtgagtccttttgtgtctttgaaaagattggtaacatataaaggctttcccacactgtttacattcatagggtttctttccagtatgagcatgtttttgaaaagactggtaatatataaaggtttttccacattgcttacattcatagggtttctgtccagcatgagtcctttcatgtctttgaaatggctggtaatatataaaggctttcccacactgtttacattcatagggcttcactccagtgtgagttctttcatgtttgcgaaagcagtggtgataactgaaggttttcccaactgctttacatttacatggttgcttttcatattcctgatactcatttggtttctgtccagtgtgagatctcatgtgcctattaagggacgaatgatgaatgaagtctcttccacaaaagctgcattcatgtggttttgctccagtaaaagtttccttgttgatattaacatttggcatctggctagtggtttctccacatttgctacctcttctactttcacagagtctctcaaccatatgacatctgtaaaaaatgaatagcacattattagtggctttttaattattttgtatttattagtaggtatgagaattacattttaaccattttcagaaaaagtataggatatctgccctgtctgaattgttttaaagttaatatattcaatgctctggaagaagactcaaccatagttatgatcaaaacagtcaatttttttgttgttgttgtttaaataagagatggagtctcattctctcacccaggctggagtacagtggcatgatcacagctcactgaagccttgaattcctgggctcaaccaatcctcccatctcagcctcctgagcaggtgggactagagagtgccaccatgcctggctaattttttttttttttccaagatggagtcttgctctgttgcccaggctggagtacagtggcacgatctaggctcactgcagcttctgcctcctgggttccagcaattttcctgcctcagcctcctgggtagctgggattataggagcacaccaccacagctggctaatttttgtatttttagtagagatggggttttgccatgttggccaggctggtcttgaactcctgacctcagatgatctgcctgccttggcctcccaaagtgctaggattacaggcatgagccactgtgccaggcctttttttttttttttccccagatgaggtcttgctatattacccaggctggtcttgaattccaggcctcaagtgatcctcctacctcagcctcccaaactgctgggattacctacatgaactattgtgcctggccaaaataataatatttataaaaggggtttctaaatgctatttcgaagtgatttatttttcacatcctgaacatctatgatgtttttaagaaaacattttcagtgaaagttttctaggaataaataaatttgaagctgtgcttaattgttttgcttgctttcttttgaaattcccccacgggccactatttttctgtggatgcaactcaccttcgatttttcccctggtttctgtggtcatcttcaatgtcctggtcttcccacttttttcctaaaatgcatacccagaaagaccattaaaaattattagaaattatagaaaattgttacagtctagtttcatgattagctgtgactgtctgattcaatcactgaaagattccctttccacatttcaaatcttggaacacagctgttgagcaagaaacacttgttctgtgttctatatttaactgaggaaagaaatgttgatatccttacctagacaaaccaggtttttgaaggtctcctgcatcacatcttcatagagctttttctgtgaagaatccagcaaagcccactcctccagggtgaagttcacggccacatcctcaaaggagactgagtcctgaaacattccacatatgtttacagaggatgggtaagactggcagtactggggatctatacttgatttgtaagaagttcccatacaattctgtgttctccaaacatttggtgtatgactcagctgtcagaactacgactgtccacactgacttcctcataaaattcatgctgtcatgaacacacagaaattacttctatttttttctttttcctttttctttttcttttttttttttttttgagacagagtcttgctttattgcccaggctggagttcagtggtgcgatcttggctcactgcaacctctgcctctggagctcaaatgattctcgtgccccagcctcctaagtagctgggactacaggtgtgtaccatacctatctaattttttgtatttttagtagagacggggtttcaccatgttggccaggctggtctcgaactcctgagctcaggcaatttgcccgcctcggcctcccaaagtgctaggattacaggcgtgagccactgtgcctggtcaattacttctaaatttttactgtgatcatgtgaaaccttattgttctctaaaggtggactcaagctcacactggaaaagtaagagaaatgctatacaaatgaaacaaattttaagaccattaatcccttgtgagaaaaactcatttcctaccttattacgtaccatatcactcagcatttcattacgcatggaatcaatctggataaggttttaataaataaatacaccttcaagaactgtaggcttttcttttattcccatcaacaaacgagaggccaggaggcctgtggaaagctaaattgtcacaaggagctgctggccatgtcctgaaggactccaggccactactgcagtggagtaattaaggaatcagagagattgaggggttgaggaggaattatttaattatttaggtgcacccacccagttggattaacatccaaagaactgagccccaaacagagtcaagctaccttttaaccatttcgtggggtggggaggagatttgtgcagggggaagtgtattacagaagcgagaaacaaagacagttattcaattaaaacacgcattacattacttcttacttttcaaggaacgacaacatgttttacgacttgagattatctgtttagtgaccttgcagctgcacagctagagaaacagtcttcacaatgcctgggaaagggagagataaggctcactagctacagaaaaataggcagtcaatttttaaaggacttcagatctttctcttcctcagggggaactggtttttcttacatacaactgagtttttgcttatacatttttaaaatttcttttaattcctgttccactataagtactcaaatccagctggctgaatgaaaatatttctttgcagaagtattaatttcaacttgtttgtgtaatatttatcacaggctcagttcttcctttttctctctctcacatttcatggatctaggagattactaggaagttagagctcaggcctgaggaggaacgtatggcaacttacacctctacaaaatttgtataccaggagagggtttattacgcgtttacttgagactttgggaagactcgggtaggctggctaggggttttcactgaggttagggagtgggctagtgtgggagttcaagcatacaagcaggggctaatgtggattgaatgtctcaccagcaccaaatgagggtgacccaggctttcttcctaccacatctggatgtagggtacatagtagaaaaggaggaatgagattttattttatttattttatttcatttgttttgagaccgagtttcgctgttgcccaggttggagtgctgtagcgtgatctcggctcactgcaaccttcgcctcccaggttcaagcgattcttgtgcctcagcctcctgaatagctgggattacagatgtgcaccaccacacccgtctaatttttgtgtttttagtagagacagggttttgccatgttggccaggctgggcttgaactcctgggctcaagcgatctgcctgcctccgcctcccaaagtgctgggattataggtgtgagtccccatgcctggcaataatgagattttaaagctatcatccatcaaacatcacaaaaaaatgaagtcagagacttccaatttctggtctcacaagtaaggaacgtagaaattgtcaatcccagccgtgcaagtaaaaaataaacatcaaatcaattacccttcttggatccattaaagaattgagggtcataaggcaaagttttctctctaaaatttgagagatgaataggaaaagtaacagttttgtaatattcccagaacataatgttcttcttaagaagacctgttctcaaaaaattccatttcaacaaaagcccaacctactatgattttaccaaagcctatgtgacctgggggcagggacacagaagcatgtgtgaaggtgaaccgttttttgtcttcccaacaccaatacaaggtgtcttttccaacgccattctccaaatctctgacatcgactgtgccctaaaatttaattcaattctaagtacccagaattagtcagactccacaggttaaggactcagtcccacaagactgcccccatgtcagatgcaagccacacggtagggtgcccaggccacccatgcttctacacgccaactacaaatctggagttcccacaccaccctttatagttcagtaattcactagggcctccctcagaagtcaggagagtgatatacttagcatcaccggtttaattacaaaacatacaactcaggaacagccaagtggaagaggcccattggtcggtatgcagagcaggtgggatgtttccatgcattccctgggtgtgccatcctcacagcacctcaatatgttcaccaacatggaagttctcagaaccccaatatttatgaaggtcccaacacacagatatgattgattaaatcattacacactaatgattaattcaatctccagctcctcttttctcttgtgaggctgggggctagggctgaaagttcaagggcaggtctttctggtcaccaatcctaatcctaaagtcatctaggatctcctaagagtgctgctttgcaaacaaggaggatcctttcacccttctcacttgtgaaattcaagggatttaggagctctgtgctaggaatcacacacaaagactaagtatctttcttatcatatcacaaaacatcacagctcgggcacaggctcactaaaagactgagatcaaatcataggactataacatgtttcccttccacctacaccttaccactattgtcattagggtttctgtttaaaaacaggtgactgcaatgaaagaatattgcactgtttctttctgcatgtttcagactttatttaacaagtgtctagagaagcccaaagatgacaggagagagaaaagcaaggacatcaaaggaaattttaacctctgacatctacggctactgaaaacagtaaacagagacaaaacccagtaggataaacctaaaacctcacactcaaggcctatttacctcagtttctttttcccagtacatcttgtcgagttttcaacaaaaattatacgaaatacaaaaaggttttaagaacagaattagaagacagaggtcaagcaccagaaccagattaggtatagaagagatgttggaattgtcagatcagaaatttaaaccaaatatgattaatatactaagggttctcatggaaatgttgaacaatatgaaagaaaaaatagacaatttaagcatatatatagaaattctaacaaagaatcaaaaggtaacgaaggacataaaatacactgcaacagaaatgaagaacagccttacaggttcatcaatacagtggaaatgtctgaagagatgatgagtgatcttgaagaactgtcagtataacccgtcaaactgaaaaggagaaacaagacatcagaagatccaaaaactgtcagaaaattacaaaaagtggaacatacacataatagtactaactaaagacaagaaagaaacagaagaaataactgaagcaataatgactgataatttcccaaaattaatgttatacatgaaaggaaatatccaggaatgccaagcaacataaatacccccaaatccacacctgggtgtatcatattcaaggagaaaattaaaagacaaagaaaaactttgaaagaagttacagggggaacaaacaacatctttgttataaaaacataaaagaattaagtcagactcttttttttgagacattgtcacactctgttgcccaggctggagtgcagtgggacgatcctggcccactgcaacctccacttcctgggttcaagcaattctcctgcctcagcctccgagtagctgagattacaggtacgcaccaccatgtccagctaattttttgtattttcagtagagatggggttttgccatgttggccaggtgggtgtcaaactcctggccccaagtgatctgcccacctcgacctcccaaagggctgggattacagacgtgagccaccaggaccagcccaagactctttacagaaagtgaaagcaagaagagactggagtgaaatgtttaaaacattataagacaaaacccccaaccacatagaattctgtatagagcaagaatatccctcaaaatggaagagaaatgaaagctttatgagataagaaaagataatctgtcactagcgtacctgccttgaaagaactgttaaaaaattccctacaaaaaagaaaaacgataaagaagggtattagagaaaaaataaatacaagtaaaatacaatctcttttttgtaatctgacagatgagtttgtccaaaacactaacaggaacaatatatttggtaagtccagcttatggataaatgatacgtatggtagcaatgttacaaaggacaggaaaggaggaattgggaatactttttcatgaggtacttgcacaaccagtgaggtagtacagtgttctttacaagaggacttgggttacttgtaagcatgtactacaaactcaaaggcaatgagtaaaacttaaaaaacaacaaaaaactataattgatgtgctaagtggggagaaaaatggcatcaagtaaaatgcttaatgaaagcagataaggtagaaaaagaatagaagatgggaaaggaagaacaacaacaaatagaaaaacataaaaagaaaaagggagacattaatacaactaaatcaataacatgttaaacatcaatggtctaaatacaacaaatggtggacagatactgtcaataatggatcaaatatacggtgttgaaaagaaacacattttaaatatacagttatagatacattaaaaataaaggaatgaagaaagatatgccatgctaacactaagaaaaagaaaagtaacacagctatgttcatttcagacaaagctgacttcacatcctggaaatctcagtgacacaggggcattatgtaataacaaagtgatcaattcaccaagaagacaaggcaatccttagtgtgtatgtgcataaaaacagagtggcaaaataatgaggcaaaactgatggaacggcagggagaactgcatggagccatgaagtatagctggagacttcaatacctgtctatcagcaatagcagatccagcaggcagaaaatgaggaaggacattgttgaactgaacagtaccatcaaacaactggactgaacggaaaatcaaaacacttagaccagcaatagcaggatatacattcttctcaagttcacatggaacattcaccaaggtagcccacattctggaacataaaacatatcttttttttttttttttgagatggagtctcgctcttgttgcccaggctggagtgcaatgacacaacctcgggtcactgcaacctctgcttcctgggttcaagtaattctcctgcctcagctttccgagtaacttaaataacaggcgcctgccaccatgcctggctaatttttttgtatttttagtagagacggggtttcgccatgttggccaggctggtctcaaggtcctgacctcaagtgatctgtccgcctcggcctcccaaagtgctgggattacaggcatgagccaccatgccctgccaggaaattgggcagctcaattttctaagagctcctaaaataattggaagcccctaaaattaaaaataatcagggaactcattttacatcaaggactacacaagtgacatcagatcaatgagatacacaatggaatttccacctaccctataatcccacagcagcaagatgtatatagaaattaaccaggctactaaaaagagaattgaaaaccctagacaaagtgagcacatcccaagaagctcttaacccggcatgttttaatttaaataaaagagaaagcattcataagaacaacctcctactcttactttatttatttattgatttttttgagacagagtcttgctctgtcactcaggttggagcgcagtggcgcgatcttggctcactgcaacctccacctcccgggttcaagtgatcctcctgcctcagtctctcaagtagctaggactataggcacgcaccaccatgcccggctaatttttgtatttttagtagagacggggtttcaccatgttagtcaggctggtcttgaactcctgacctcatgatctgcccgccttggcctcccaaagtgctaggattacaggcatgagccaccacccccggcccttcctactcttactttaatcaaccaaccttaatagtcacaaaggataaggaagacaatgatacaaagattataccttacaaggggagcatttgactaaatgccaactctatctcccagcaggacatcttggcccatggatatgaaaatacttattgactacaggtaaaagaggagacttagaattatgcaaaatctccaacttttctccaaattctcactagacctagatttgttacaccttttacaacagtggcactacactgttttcttcaagtcactgattgcatcaatatttccataagaataattgaaggtatacttcaatccagttttacttgccactcacctcgtatttttaacttcaacatcacctgtagccatcactggaataactcgtttacttgcttaagaacaacaacctgggcttggtgtggtggctcatgcctgtaatcctagcactttgggaggccgaggtgggtggatcacctgaggtcaggagttcaagaccagcctgatcaacatggtgaaaccctgtctctactaaaaaatacaaaaattagccaggtatggtggcagccacctgtaatcccacctactagggaggtagaggcaggagaattgcttgaacccaggaggcagagtatgcagtgagccaacattgcgccattgcactccagcctgggtgacagagcaagactcagtctcaaaaaaaaaaaaaaaaaagaacaacctggctacaaatttgtgtagcttctcagttggtcttaccgcctttctcattcacctctgctagtcatcagagtgactttactgtcttgttattacttaaattccaaccacataaaccagggtaacacaagcatacacaccactgcagacaaatgacaaattacaccatctgcttgccaagcacagtatctgattaataatttgcagactgacagcaacagtgcactcccagcatggagacttagtttctccaagatcacctttagcctttctaagatctcctatgtctcaccttattctacatatggctagccagttttcccaacaccatttattaaacagggaatcctttccccatttcttgtttttgtcaggtttgtcaaagatcagggtcgtagatgtgtggtattatttctgagtgctccgttctgttccactggtctgtatctctgttttggtaccagtaccatgctgttttggttgctgtagccttgtagtatagtttgaagtcaggtagcgtgatgcctccagctttgttcttttggcttaggattgtctttgctatatgggctcttttttggttccatatgaactttaaagtagttttttccaattctgtgaagaaagtcattggtagcttgatggggatggcattgaatctataaattaccttcggcagtatggccattttcactatattgattcttcctatccatgagcatggaatgttcttccatttgtttgtgtccccttttatttcattgagcagtggtttgtagttctccttgaatagttctccttgaagaggtccttcacatcccttgtaagttggattcctaggtattttattctctttgtagcaattgtgaatgggagttcactcatgatttggctctcttttgcctgatattggtatataggaatgcttgtgatttttgcacattgattttgtatcctgagactttgctgaagttgcttatcagcttaaggagattttgggctgagacgatgggttttctaaacataaaatctgcaaacagggacaatttgacttcctcttttcctaattgaataccctttatttctttctcctgcctgattgccctggccagaacttccaacactatattgaataggagtggtgagagagggcatccctgtcttgtgccagttttcaaagggaatgcttccagtttatgcccattcagtatgatattggctgtgggtttgtcatagatagctcttattattttgagatacatccaatcaatacctagtttattgggagtttttagcatgaaggaagggctgttgaattttgttgaaggccttttctgcatctattgagataatcatgtggtttttgtctttggttctgtttatatgatggattacatttattgatttgtgtatgttgaaccagccttgcatcccagggatgaagccaacttgatcatggtggataagctttttgatgtgctgctggattcagtttgccagtattttatttaggatttttgattcaatattcgtcagggatattggtctaaaattctcttttttttgttgtgtttctgccaggctttggtatcaggatgatgctggcctcataaaatgagttagggaggattccctctttttctattaattggaatagtttcagaaggaatggtaccagctactctttgtacctctggtagaatctggctgtgaatccatctggtcctgggctttttttggttggtacgctactaactgttgcttcaatttcagagcctgttattggtctattcagggattcaacttcttcctggtttagtcttgggagggtgtatgtccaggaatttatccatttcttctagattttctagtttatttgcgtagaggtgtttatactattctctgatggtagtttgtatttctgtgggatcagtggtgatatcccctttatcattttttattgcatctatttgattcttctctcttttattctttattagtcttgctagcagtctatcaattttgttgatctttttgaaaaaccagctcctggattcattgattttttgaagagttttttgtgtctctatctccttcagttctgctctgatcttagttatttcttgctttctgctagcttttgaatgtgtttgctcttgcttctctagttcttttaattgtgatgttagggtgtcaattttagatctttcctgctttctcttgtgggcatttcgtgctataaatttccctctacacgctgctttaaatgtgtcccagagattctggtatgttttgtctttgttctcactggtttcaaagaacatgtttatttctgccttcatttcgttatgcacccaatagtcattcaggagcaggttgttcagtttcgatgcagttgagtggttttgagttagtttcttaatcctgagttctagtttgattgcactgtggtctgagagacagtttgttataatttctgttcttttacatttgctgaggagtgctttacttccaactatgtggtcaattttggaataagtgcgatgtgatgctgagaagaatgtacattctgttgatttggggtggagagttctgtagatgtctattaggtctgcttggtgcagagctgagttcaattcctagatatcttgttaactttctgtcttgttgatctgtctaatgttgacagtggggtgttaaagtctcccattattattgtgtgggagtctaagtctctttgtaggtctctaagggcttgctttatgaatctgggtgctcctgtattgggtgcatatatatttaggatagttagctcttcttgttgaattgatccctttaccattatgtaatggccttctttgtctcttttgatctttgttggtttaaagtctgttttatcagagactaggattgcaacccctacttttgtttgttttccatttggttggtagatcttcctttgtccctttatcttgagcctatgtgtgtctctgcacgtgagatgggtctcctgaatacagcacactgatgggtgttgactctttatccaatttgccagtctgtgtcttttaattggagcatttaccccacttacatttaaggttaatattatgtgtgaatttgatcctgtcattatgatgttagctagttattttgcttgttagttgatgcagtttcttcctagcatcaacggtctttacaatttggcatgtttttgcagtggctggtaccagttgttcccttccatgtttagtgcttccctcaggagctcttttagggcaggcctggtggtgacaaaatctctcagcatttgtttgtctgtaaaggattttatttctccttcacttatgaagcttagtttggctggatatgaaattctgggttgaaaattcttttctttaagaatgttgaatattggcccccactctcttctggcttgtagtttctgccgagagatttgctgttagtctgatgggcttccctctgtggggaacaagacctttctctctggctgcccttaacatttttcccttcatttcaactttggtgaatctgacaattatgtatcttggagttgctcttctcgaggagtatctttgtggcattctctgtatttcctgaatttgaatgttggcctgccttgctaggttggggaagttctcctggataatatcctgaagagtgttttccaacttggttccattctccccgtcactttcaggtataccaatcagatgtagatttgtattttcacatagtcccaaatttcttggaggctttgttaatttctttttactctttttttctctaaagttctcttctcacttcatttcattcatttgatcttcaatcactgataccctttctcccacttgatgaaatcagctactgaagcttgtgcatgcatcaagtagttctcgtgccacggttttcagctccatcaggtcatttaaggtcttctccacactgtttattctagttagccattcgtctaatcttttttcaaggtttttagcttctttgcgatgggtctgaacatcctcctttagctcagagaagtttgttattaccagtcatctgaagccttcttctctcaactcatcaaagtaattctctccgtccagctttgttccattgctggcaaagagctgcattcctttggaggagaagaggtgctctgatttttagaattttcagcttttctgctctggtttcttcccatctttgtggttttatctacctctggtctttgatgatggtgacgtacaaatggggttttggtgtggatgtcctttctgtttgttagttttcctcctaacagtcaggaccctcagctgcaggttggttggagtttgctggaggtccactccagaccatttgcctggatatcaccagcggaggctgcagaacagcaaatattgcagaacggcaaatgttgctgcctgatccttcctcttgaagcttcgtctcagaggggcacccggctgtatgaggtgtcagttggcccctattgggaggtgtctcccagttaggctactcaggggtcagggacccatttgaggaggcagtctgtccgttctcagatctcaaaatccatgctgggagaaccactactctcttcaaagctgtcagacagggacatttaagtctgcagaagtttctgctgccttttgttcagctatgccctgcccccagaggtggagtctacagaggcaggcaggcctccttgagctgtggtgagctccacccagttcgagcttcccagccgctttgtttacctactcaagcctcagcaatgacggacgccccttccccagccttgctgccgacttgcagtttgatctcagactgctgtgctagcagtgaaagaggctccgtgggtgtgggaccctccgagccaggcatgggatataatctcctggtgtgtcatttgctaagactgttggaaaagtgcagtattagggtggaagtgtcccgattttccagataccatctttcacggcttcccttgactaggaaagggaattccccgaccccttgcacttcccaagtgaggcaatgccccgccctgctccatgggctgcacccactgtctgccaagccccagtgagatgaacctggtacctcagttggaaatgcagaaatcacccatcttctgcattgctcatgcagggagctgtagactggagctgttcctatttggccatcttggagcctcaaggccgagtactgttatatcttagttgttacagtgttatgtttaatcagatacatattacatatccaataattaatataaaacataggattgacacaaatagactaaaatagttaatttttttctttttttgtagtgatggggtctccctatgttgctggtctcaagtcatcctcccgccttgaccttccgaagtgctgggattataggtgtgaggcaatgcacgcagcctaaaatattttagaatataaaagggatataacagatacaacaactactactactactacttctgttcctaccactcctactaaagccaccgtaaaaattcctgagcctcgaatacatagatatccaacaatgccaactcatacctaaaatcacacgattaccagaacacactccacatgtacttgatgaaaatatattcttttttgaacaactgccagaaaaatcaagggactaataatatgtagtctcagaccatttgaaatgaatgcctaaagagtttctacacacacatccaatcaatgcatctttatagacgcttggcatgtattcccaaacaccccttagaagaccacataaatgcgactcaaccaatgtatgtagctataatcaagcattcaataacatctcaaaccaatggacagcacacataataatagaaaaatgctaccagaaacagacatgccaatccaaacagatcattacccagcctggccatcatggtgaaactccgtctctactaaaaatacaaaaattagctggcatggtggctcatgcctataatcccagccactcgggaggctgaggcaggagaatcgcttgaacctgggatgtggaggttgcagtgagccaagatcgcaccattgcactccagcctgggcaacacagtgagactcttgtctcaaacaaaacaaaacaaaacaaacaaaaaaacacaacaacaaaacaaaacagatcattagataaaagcaatctgtcagaccaaacaccaatcccagtaccacagtcaaaccatatactggggccaggtgcagaggctcatgcctgtaatcccagcactttgagaggccgtggtgggtggatcacaaggtcaggagttcaagaccagcctggccaacatggtgaaatcccgactctaataaaaatacaaaaagtagccaggcatggtggcaggcacctgtaatcccagctactcaggaggctgaggcaggagaatcacttgaaactggaaggcagaggttgcagtgagccaagatcgagccactgcactccagactgtgcgaaagtgcgaaactccgtctcaaaaaaaaaaaaaaaaaaaaacatatactggaagaactaacatgacaagcttaaatatgatatatactcctatgagtcatttgttgatacttgatgtgaattctggtaccaatctgaactcgaaggaagtaaagattatgattacaaagcagatctaaaagatggtacaacaccagacacagctatcacaccaatcattcatattacatatacccaactttcagacctccacgggaaaaaataccaatgccactgggatacccattggactgtgatatataatagaagaggataagacatactataatgattctctaactttccacttttgagaaattttgccttccaaccttgttataattatgccaaaagtcaaacttatttgacagaaccacaattctttgacagaactaaaaaaatcctcatagtagaattagattggaaacaaagattacacccagtaatcttttccccccgacaagacggagtcttgctctgttgcccaggctggagtacagtggcgtgatctcagctcgccgcaacctccgcctcccaggttcaagcgattctcctgcctcagcctcccaagtagctgggattaaaggcacccaccaccacacccagctaatttttgtattttttagtagagacagtgttttaccatgttggccaggctggtctggaactcctaacctcgtgatccacccaccttggcctcccaaagtgctgggattacaggtgtgagccattgtgcctggcccacccaataatcttaactgatcctcatcactttacacacacaacttttttttttttttttgaggcagtcttcctctgtcatccaggctggagtgcaatggcgcaatctcagctcgctgcaacctcagcctcctgggttcaagcaattctcctgcctcagcctcccgagtagctggaattataggcgccagcccccacatccagctaattttttgtattttcaggagagacaaagtttcaccacgttggccaggctggtctcgaactcctgactcaggtgattcactcatctcggtttctcaaagtgctgggattacaggcatgagccaccacacctgggcctacacacacgacttctgaaacacatgctaaaacaacagaagattatgtagacagagttgtcctaaatatacttgttttcaagggtaccaattaaacaccacaactgagaaacttataaaaaaaaatgtacagaatcacccaatgagacacatattttaagggatgaccaacattaatatgcttccaccttaacatatattagagctgtatttcatcatcctacaggtgaaaaaccttaccctcacccatttttcaatataatttactaaaatggctacatatacctagaccgataagctttacaaatcaaactgaatgaacagacacagcaccattcagaatgtgacataattcaacacatactaaattcacattcgtggcaagcttggctacaatatatgcaaactacctttatttatttagttagttttttttgagacagagtctcaaggctggagtgcagtggcattagctcactgcaacctctgcctcctgggttcaagcaattctaattctcctgcctcaacctcctgagtagctgagattacaggtgtgtgccaccaggctcggctaatttttttttgtatttttagtagagatggatttcactatgttggtcagggtggtcttgaactccttacctcaggtgatccgcccgcctcggcctcccaaagtgctgggattacaggcgtgacccaccgtgcccagcccgcagttttatttaagggcagggtttgattttaaacacaaacttaactcccacatgtcaactaccactttcatactctcctctatctcacagacaatgaaatacaatcaatgatgactcatataaatgacctcacagaatatcaaaaggtgtttaattacagtatcaattacaaggtaggcatcttaaaaaccaatctatttacattaataaacttgacggtgaaagactgactgcaaacccaatgtactaagcgaagtacttatactaactcagacttggaataacataagaaatccaatacaggccgggcgcagtggctcatgcctgtaatcccagcactttgggaagctgaggcgggcggatcacctgaggttgggagttcgagaccagcttgattaacatggagaaaccctgtctctactaaaaatacaaaattagctgggcgtggtggcgcatgcctgtaatcccagctactagggaggctgaggaaggagaatcgcttgaacctggaaggcggaggttgcggtgagccgagatcaccccattgcactccagcctgggcaacaagagtgaaactccatctcaaaagaagaaagaaaatataaaaaaagaaacccaatacaatcaggaaaattatttacaaaacactggcataaagcagctgtagttcaactggatacatccaaaccatcaggatgtgaagattcaaggtcacgtatattaagcctacttgaattaagatgaggagactcacaactagcttttgacccaagtacacagacagataaaagatataatctacaaataaccaccttagaaaaaccattatttattgattattttatacaaaaataattagtattccaattctgaaaaactatatactacacctttcaggatagggtacccaaactagatatggtacccaaactgacatatcagcatcaaaagaatacccacaatcagccaggcgcggtggctcatgcctgtaatcccagcactttgggaggttgaggcaggcagaccacctgaggtcaggagttcaagaccagcctggccaacatggtgaaaccccatctctgctaaaaaataaaagaattagccgggtgtggtggtgggtgcctgtaatcccagctatgcaggaggctgaagcaggagaactgcttgaaccagggaggcagaggttgcagtgagctgtgatcatgccgttgcactccagcctgggcgacagagtgagattccatctcaaaaaaaagaaaaaaaacaacaacaaaactacccacaatgactctagacttaggaaccttccactggttaattgctcagagaaaaacacactgacctattacaaccacacgaggaaagaaaaaatcacaacatacacttacaatcagaatgtatcaaagtggtgtgtgtcataaacatcactctcacaaacacctcaaagcttaccacttagccgggcgcggtggctcacgcctgtaatcccagcactttgggaggccaaggcgggcagatcacaaggtcaggagatcgagaccatcctggctaacacggtgaaaccccgtctctactaaaaatacaaaaaaattagctgggcgtggtggcgggcgcctgtagtcccagctactgggaaggctgaggcagaatggcttgaacctgggaggcggagcttgcagtgagctggagatcgcgccactgcactccatcccgggcgacagagcgagactccgtcacacacaaaaaaaaatgcttaccacttatatacggaacaaatgacatacagagattttgcatcatcatggcactccaacataggcgaaatctcttgggtagaaaccacacagataaacacacacaaacaagaaaatttaaaagaacctgaacaagctcacaattaattccatccagaaaccaaagaaactaaaaatcgcacacattcacgcaagggaacaaaattacccagagcgaagggaaactggaattaagggtggctagaattaatatttgatcaaggagtccaaagggaagaaacacaaactttctgatcagttaagataaggagtccccttccccgcagttcgaaaagaaagcccacattcagaaggtcaaaaacacccccagacttgagtgctgggagcactagagggggtcagtccctggtgatgagggcaggggcgtttgaacagccacaggaacctgaccccggcagcaaggacctagccaggcttcggttctcacaagtgaggaaacgcacccgtggattcatcgtaaggtttccaaccaagtggtttcttaaacgcacaaaccccacagaccgagatgggatctccccaggaccctcccgctgtcaccgaacaatccggggagacgcggggctgcgggcgcagagctgcccatagagggctccaggaccgggggccgaggtcgccccgcggggacgggacaggacgctggggctcccggctgcgggtccagctcccacagagaggaccgagggccgaactgcgcccgcggtggcccccgggtctgcaaaccccggagttgactgcaaggaggtccccggcctcggccacagacggttccaaccagaaacctcccctcggacactggccccgcacactcaccatttcccagcgtccgggaagtcacggtgtcctccctacggatctgtcagtacctgcaggtcacggcgcgacaaaggatgcgctagagccaccttcggccttcaggagcaggtgaaacgcaatcttcccatgggccaggaatggcgacgtccgcactgcgcaggcccagcgtggcgccgctcacatcttttcagctgaggtcctgattggacagatccaatggccccgcctctttatcactgagtgacagcggagcaggaaggggcgtggttgagctggcctggcttcagtccggcttgtccccgccaggacgtttgcgtttaaaccgaatgtgttctttgcctcccatccattttaagtgttctcttcagtactgttaaatacattcacattgtgaagccaatttccagaattgttttcatcttgcaacactgaaatctgtctcgttgcacaactccccgtgcacctccttccctcagggtcttttgcaacctccattccattgtctgagttcgtgaatttgactgtgggaatctcatgtaaatggcgtcataaagtatttgtcctttcctgacgtgcttatttcacttagcataatgtcctcgagcttcaccttgtagtatgtgttaggatttatttcttctttttttttttttttttgagacggagtctcgctctgtcgcccaggctggagtgcagtggcgcatctcggctcactgcaagctccgcctcccgggttcacgccattctcctgcctcagcctcacgagtagctgggaatacaggcgcccgccaccacgcccggctaattttttgtatttttttagtagagacggggtttcactgtgttagtcaggatggtctcgatctcctgacctcgtgatctgccggcctcggcctcccaaagcgttgggattacaggcgtgagccaccacgcccggcctcttcttcttttttttttttttaagagacagggttttgctctgtagcccaggctgaagtgcagtggtgtgatcattgctcactgcaggcttcaactcctggattcaagcaagcctccaacctgagcctcctaagtatctgggactacacgcacgcactaccaggcctggctaattgttttaattttaattttaatttttggtagagatgtgtgtctccttctgttgcccaggctggtctcgaactcctaggttcaagcaatcctcctgcctcgacctctcaaagtgctgggattacaggtgtgagccactgccaccggccaatttacttctttttttttcctttggagatggagtctcgctctcgttgcccaggctggagtgcagtggcgctcagccaccgcaacctctgcctcccaggttcaagtgattctcctgactcagcttcctgagtagccaggattacaggcgcccaccactactcccggctgatttttgtattgtagtagagatagagtttcaccatgttggccaggctggtctcgaacgcctgacctcaggtgatctgccctctttggcctcccaaagtgctgggggtgtgagccacctcgcctgtccccaatttacttctttttaatgctttatttaaacattttttaaagagttcctaaattagtcagttcctaaatctacatacaatagaatagaattgtattctattgtatgtagatatcaaatttctggatttttctggatctatttatctttctttctttttttttttttgagacagtcttgctctgttgctcagactggagtgcaatggcgtgatctcggctcactgcactccacctcctgggctcaagcaatccttgtgcctcagcctcctgagtagctggggttacaggcatgtgccactatgcccagctaatttttgtaattttagcagagatggggtttcgccatgttgcccaggctggtctcaaactcctggggtcaagagatctgcccaccttggcctcccaaagtgctgggattaccgcatgagccacctcgcccggccttatttatcctttcctggacacctaggttgcttctgcctttggctatggtaaataatatgtctatgaacatgggtgaacaaatatgtgggttgctgctttcagttttttagggtatgctcagaagcagacttcctggatcatatgattactttgtatttattatttatttaaggaatggccatactctttttcctagcagccatagcattttccattcccaacaacagtgcacaaggatcccaaaaggtgttctcacttttttggtggtgtcctttgaaatacaaaagttatcaattttgctgggcatggtggttcatgcttgtaatcccagtactttgggaggctgaggcacgaggatcgcttgaggccagaagtttgagaccagcccaggccaacattccaagaccctgtctctacaaaaaataaaacaattagttgagtgtggtggtgcacacctgtagtcccagctactcaggaggcagaggcaggagaatcactgggggctgggaggttgaggctgcagtgagccatgattgtgccactgcactccagcctgcgtgacagagcaagaccctgtctcacacacacacacaaaagattcattctatactaggcattgatatgttatttattgttttattgttttattttttgagaagggtcacactctgagatcacgcctgagctgaaacttagagtgaggttagccaactcttagagtgaggtaaggctagctctccaactttagcccttttccctgtttgcctttctctctgccattactgaactgctggtcatgccctcctcaccaatttctctctctcccttttttttttttttcttttttgacagagtctcgctctgttgcccaggctggagtgcagtggtgcgatcttggctcactgcaacctccacctcccgggtttaagcaattctcctgcctcagcttcccgagtagctgggatcacaggcacgcgccaccacgcctagcttatttttgtatttttagtagagacggggtttccctctgttggccaggctggtctcgaactcctgacctcaagtgatcctcccgccaaggcctcccaaagtgctgggattacaggcacgagccatcgcgcctggctgatttaggaactctttaaaaaatgtttaaataaaacatttttgtattgtcttttttttttttttcttgaggcagagtcttgctctgttgcccaggctggagagcagtggtgcgatctcggctcactgcaacctctgcctcccaggttcaagcgattctcctgcctcagcctcccgagtagctgggattacaggcatgcaccaccacgcctgtaatttttgtatttttagtagagatggagtttcaccatgttgcctaggctggtcttgaactcctggcctcaagtgatccacgcgcctcagcctcccaaagtgctgggatacagtacaggtgtgagccaccatactcagccaatttaggaactctttctaaatgtggtaatacagatacctcaaagctaaaataatattcccaagcctttaactttttacgtgatggaatattgtgtctcagcagaatattgagttgcctttctttttttttgagacggaatctcactctgttgcccaggctggagtgtagtgctgcaatctcagctcactgcaacctccacctccccggttcaagtgattctcctgcctcagcctccctaatagctgggattacagccacgcaccaccatgcccagctaatttttgtatttttagtagagacgaggtttcaccatgtgggccaggctggtctcgaacccctgacctcagatgatccgcccgcttcggcctcccaaagtgttgggattataggtgtgagccaccgcgcccggctgagttgcctttcttctcaactaaaaataggcctgtttgtatcaccttggccatgcctgtctactctgtattttgattcaaatcaaactatcataatagttatgctaataacacataaggtaaagacagggtttaataaatttgtttattatatcagttatgtgatctatataatttctcttgtctctacttcattttatattctcagccaaatgcccagtagtggttttatctttttgaagtgtgagattatctccccacttcttccaattcttctttcttctttcactctttttttattttattgttttttttttttttttagaaagggtctccctctgtcacccgggctggagtgcagcattgtgatcgttgctcatcgcaacctcgcctcaagcggtcctcctccctcagcctcctgagtagctggggccacaggccgatgctcccacgcctggctaattttttcatttttgtagagatggggtcttgctatgttggccaggctagtctcaaactcctggcctcaagtgatccccccgcctccgcctcccaaagttctgggattataggcatgagccactttacctggccccaaatgatggctttcttattctttcatttcttcaacgtggataaagaactaaaacaaaacaaaaccaacaaagaggggagaagggaaggaaagcatgttaatttgctgctcaaatgccccccgatgtggtggtcatgtcaagctgacttaatgtttttttgatttgtcactggtttcctttgagcacttccctactttctggcctaacataagatgatgaacatgagatgttccaagcttatcttgtattttctctgctccagccctggaactagccatttttcttagaagcaggggtggagagcaccctccccccacgcaccttcactaggccccagtgggaagaactgctgcccatctgctcaggtgtggtgaaactagcaaagagtctcctggctgcctgtggagagtctctgtatgtggtcctcagcccagcctgggggctcctgggctggctaccatgctgcctctactgtgtctctagatccaggctctgctggaagagccctggaaggcccagcagaagggggagcctgtcctgacaaacatccctctgttcctctggctccaaggctcaggaatagggccagatgacatgtccaggtggtgccaggacccctcactgtccccttggagatgggcccagagagccttgtgggggcacctggagcctgaggctgaccgtccctccctgtgtcctggatgaggagccctgtcctgagaagacccccaggggctggcctgcgggcgcagccacaggaaggggagggtctgtgggctgagtttgggcggggggcattagtagaggactttgggcactacgtgtcagtggtctgatcagcgggggccttgtcattaggaacctggtcaggggatgggtgtggtggctcatgcctgtaatcccagcactttgggaggcctaagcgggaggatcgcttgagctcaggagttctataccaccctgggcaacacagtgaaaccccctctctactaaaaatacaaaaagtagctgggggtggtggtgtgcacctatagtcccagctactcaggaggtggaggtgggagaattgcttgagcccaggagatcaactctgcagtgagccaagattgtgccactgcactccagcctgggcgacagagtgagccctgcctcaaaaaaaaaaaaaaaaaaaaaagtaaagtccaaaaacaaacaaacaaaaaaataggaacctggtctgggaggattggttaacagggacttggtcatccaaggcctggtcagtgggggccttgtcattggggaactggtcagtggtacctggtcagcagggactgggtcagtgggaactggtcagctggctgctgggtgacctcaggtaaacagtttgtccctgatgcctccttgcctccatccctgagtcacagacccccagaggtctactgggaggaggaggtgagaaggtgagttgaatccaggcctgccccttagacctagcactttacatactacctgagtcccccaagggaggggccagctctctgccctctgccttcagccctctgccctcagccctctgccctcagctctctgccctcagctctctgccctctgccttcagccctctgcccctactctgtctgcatccccaggacagacccatatggagagggcagagactgaggagcacccatggatgctctgatgctgaccatgggccctagggtgacagtgatgaggacgtgggtgtgcacgtgagtgtgacacacacactcacacagatgttcacccacacgggatgctcacatgcacagacacatcacacatactcaggttgacagtgcagggggtggaggacgctgactctcggccctttgtgggtgctgtgaccccaaaatatcaccatgccaaatgcccacctgcctgcctctgtgtcacggagcagtcagaggcacgccagtgtctgtgagtgctgggcacgtagggctcttttctaggcaagaggcacatctccgaacagctgccagatcagactcaagagcatgacctgctctcttccttccctgctgacttggggacagtcactgcctggtgggtgatgctggtctctgggcagctgccaaagagggtcattcctgggcactcaccagtgcttgttctgtgctgaccatgtacacggttgtcttgttcatcctcgtggtgactccagggggtgggtgctgtccccaagtatacccattcgacaggtgagacatctgaggttataagggcggtcactggtccaggaacccagacgtgaccctgggccatgctctcacccctgccctgtgctgtgtgggactcactcccttacgcggtgccccttatgccctcgatcccaaatctttccaaaatttttgacagcaataggacagagcctggccttggaagagcccctgtgggtggggtggagggtggtcttccatccaggtctgtgtcctaaggtgggtccctgcaagagaagatctcatcaacccagactttgggtgcagtcagtgggggtcgctgtgggacccactggacatatgggatctcttgtctgggagtggggtggggagccctctgtccttgggcagttgtggaaaatgatggcgccccggagggttggttggagggtgatgatcgttcctcctcttcaccgggaactggggctcttccgcacaaggccctttctctgttcctttacgggcctcgccctttctttgttccgaatgttcatgggaagggaccctctggagttctccaggaccaagtcatcagagttctcattctttctcagtgaccccggaacacgagggtccttcctgtattgacagctcagaacttgggatccactgtcccttcacctgagacatcttcatgagcagagaggctgcattgaccccaaaccaagcaccctcccgtttggctgatgttattcttgaagcggcttcactggccagagggagtggagatgggggtgaaacggagcagtcacgaggtgtcttgttccctgtaagaaactgggcatcttcatggtccctgcgtgatcccaggaggctgagcatatggagctctctgatccctgaccccagtctacctgcaggtgtctgaaatagcgcaccacaggcccctcaccctcagcagatggacaccgttcctcccttatgtgcctgatttagggcatttggggacaatgggcctctgtgtccaggtccccctgttctcaaatcctcaggaagaagcccacctctggctggggcagggactccagagaccccagcaggcatggggaccctagatctggccccttttcacccggagcggtggtggcatggggttcacctggccggcggcgtctcagagttgggtggaagcggtttgggtgttctctgtagcacccaggtgcagtgtggcctttggacaatgttgtctcgcaggatggacatggaaaaggattacagctgccctgcccgcgcaggagcgggacatcattgacaagtgtgagcaggtccgggtcgggctgttccctcgagggaggcgaggccacccatctccagctgtatcctggtcggagtgtcctgggctccctccggatgcagggccaggaccagctgctgggaacttcatgcccccacacccctcacctcggccccctcaccctgaatcccctctgggtcacagggatgctgagcagaggcacctgcagacgtggggcctgaggatattgacagctacaaagtcaccgatcacctcgggattcggcagtgagtcctctgttcccaccctcaccacccagggatgggttttttttttttttagaaaggcctcactgaggcaggacacatctccccagctcgtgccaatctcctttctagcgtagaaactcctcccctgtcaaagtcctttaaatgctcaaactgcctgctttggattcttattgaacttatactccaccctgtggtacaggggctaatatgctgggcctttaccacttcagcccaggttcgattcctggtcagggaaccagtgccacttgtcttaatttgcatgactctttaccctttgagaggtgaacccagaaaatccgtgacaggtctcagttaatttagaaagtttattttgccaaggttgaggatgcacccgtgatggtctcaggaagtcctgacgacatgtgcccaaggtggttgggacacagcttgcttttttttttttttttttgagacggcgtctcacactatcacccgggctggagtgcagtggcgcgatctcagttcactgcaacctctgcctcccagactcaagcaattctcatgcctcagcctcctgaaaggctgggattacaggcacccaccaccatgcccagataatttttttttttttttgagacggcatctcgctctgtcgcccaggctggagtgcagtggtgcgatctcggctcactgcaagctccacctcccgggttcacaccattgtcctgcctcagcctcccaggtagctgggactacaggcgcccgccaccacgcctggctaattttttgtactttttagtagagatggagtttctatgtgttagccaggatggtctcgatctcctgacctcgtgatccaccagcctcggcctcccacagtgctgggattacaggcgtgagccactgcgcctggcccacagcttgcttttatacattttaaggagacatgagacatcaatcaatatatgtaagaagtacattagttctatccagaaaggtggggacagctcaaagcaagcccccaccccccgggggaggtagatggaggctgagagatcagaccttgcggggcacttggggacatcaggtgggacaggccccaggtgcaccctcagtgcactgggcaggtctcaggatcctggcctggtaatgtggtcactccctcgaggactgcttttggggcccagtcacccaccctgggccatacacgtcctttctcaggactggactttctcagctcctgcagagggcactgcctctagcccaggaggggcagccctgttgtgtagcccaagcccatgctctacagggccctagtggtccctgccccacccacacacccctcttctcccaggtcctgtcccttcacaggcgtcagcccacagggagaccctcttcctaccttccctgtgtgtctcctgggctaagaccaggggtggggtggggagagacacggctggtccttccctaggactgctagggaaggaggaggacagctcccggcccagcacaggccctcagctctgtctgggttgccttacagtgagacaaagctgccatcgatcagtgccctggaggcaaaggtaagacctgctgcctgagaggctggtccagggacaggaggacttggcaggtggtcagcagcccgtgggcaccagcgatggtgagtgggagagacaggctgtccctgggaggggtggcagttcctgctggacctgaccccaagactctgtccccattggttgtttgaccaaactccaaactgagaaccgcagtcacggctcgggggttgctgtctgcttgcaccaggaccccacctggaggctagtacttgaccaaagtccagtgtctgtggcctgaggatggcatgtcccaggtcgtgaggccaggtcacagacgcctgttcagtcagagggtctcagtccccggggcctgccctttcctggttctttttgtggttcagtcccgtcagggcctcggagcccaggatacagcatccaaaggctgcttcaggaagccttggtagctccgctaacttctggtcatagttgacagcaaagacgtcaggagatgagaggcacagagaaatggctccagatgcttcaagacgggcagggatataggagtggcaaggaggtgacatggggagggagggcccccgtgaccgctctctacagagtcagggggatgggctcccatggctgggtcctggcactgcctgcctctcagagggtgggtgacacactgtcctcaccctggacagcaggtctggtcaccagctttcctgtttgtccctgcaaacctcaacttgctggagacagtgtgatgccagggcatgagccaggactatctcagggatagggacaccccctggcaaaccgaaggaaggaataggtcaagatgagaattcataactctgaatcgtgggagggaggcctggtcctaggtaaactgcacatcccctgaaaaaccaacaagtcagagactggagacttccagaatcctcaggctccgatcctccctggggctgccccagaccctgtttcttcagagtgttctgtcccaagttgatagacagcgtgtataaaggcattctccatagatgtggggccaagtgtggtcacacttcctggatgtcgagaaggtgaaggccgagaactggtggaaatacgaggtatgacccttccgaagtcagccagaggaggacaaacaggccaggctgtgttgagagcccaagcctccagctggagggaacgcagagcctgggttgaaggtggagggggcatggtcaggcggacatcctgggcagagacggtgatgccagcaccaaaggtgagctgagctccaggactagttggattgtaaggaaccaagccagaggaggagctttctgcagaaggaaaccaaccttccttccttccttccttcctcctgtcctttcctttcctttttcctttcctttttcctttcctttcctttcctttttcctttcctttcctttcctttcctttcctttcctttcctttcctttcctttcctttcctttcctttcctttcctttcctttcctttcctttcctttccttctttccttccttccttccgggctgcctgtggacgactgccgtgtggggcagccagtcttctctctgttcagaggctgcttcctcttcctggccctgccctggaggtcatgaagatgaagggaaagaggtcccccctggaacttccaccagatcaacctggatgtcagccatacactaagaaaccacatgatgttttggccacaatgcagtgtcaattaaggcttgcagggctggagagccctggggagatggcgtgaaccagagggatgggagcttcaccagagcagaggcaggggtcacccaggaggggtgacagagctaccaaaagctttccaggcccagggagcagctagcacaatagactgagtgccttcctggttgcaagccctgggcctggctgggatatgtggggccggagcccaggtggctcccgaggagacagagagcaatgaacaaaatcatgagaaatggtggaaagttcagtaacctacgggagggcggcaggatgaggggctcgggagccttcccaagccacactgacgacaccaaatgccgagacgatgtgcggtcccggggacctttgtccctgccaggtgggaatgcgacagggcacagcccctttgggaacccgttgggcggctctgcacgaaactcggtggactcgtgccacatgtcccagaagattctcagagactgatcccactgatttgaaaactgatggccatgtaaaacctgcatgccacgtccacagcttgattcaccgtcactcacagttgaaggccaccaagacaatcttcaacccgggaatagtaaaatccactttcaccaaaacatttcataaaactcagtggccctgaagagctcactgcttattctgcgcatcatctggacctggaattggattccttgttggaacacgatagagagaacaaaacagcatccgtgtgaacccaaaccctcttttctctctttcctaggctgcagcatgtctttcttgtcctggtggcatattgcacctaatcccatgagtattccaaggcaacaatattcgcgggtcacattcccatattcataggcacgggtgtcttgggtagggggtgtcattgcttctttaaaattcagtatctgacacctaccaagacgcagccggtaggactcaagctcgctgttggcttgaacattcaagcgaggcagggagggagggtctcagaggggtcatgctgagatggagagggctcaggcacagactcctggtctgacctgagcctgacccccaatctcagaacaagaaatgacaccctcctcctgggcttgccccaaggtccaggagctggtcagtgtcccaaagtggtcctcccaggaggcatttttgacaagttgccaaagtacccgatggacgtcgctcttgtcacgaaatgagtgtggatcccgcggaagctgttccttcattggaaaactggcagggatccaatgtcccctccgcccgaaccccactggagcgcagcagacagggagggggttcctgaagtgcctgctcccactgtgcccccagtttccagatcactcctggagggacagccactgagctggctccatgggctgcacacacagggtctggacccagcctccctctcatacctggcaggcagcccctgggtcttcccaggaccctgtatgcggtgggcccccagcccgccctgttggccagcctagctcacagatgctgtcccaagcctggcacggtggcctccctggcctggcatctgagggggagggacatccacggtcctctcctatgtcctctcgggccatgtgggcttggacactcgctacaggaatctctctggactccttgtcaactgagacgtgcgtgacttgctcagtcctgacacccagtgtcaggagaggggtgaacaggctgcaccccaaatcccacagggcctgtggcaggcctcctcaatgacatcagtcctctcaggtgacctcagccctcccaggtgacatccttccatggtgactctgactcttgcaggagctgggctactgcagggccatgagctgcattgctgccactctcctctatctgcccagaaaagataccttctgagtggtggcccagctgctggctggtgagaggcactccttgcagggtaggtggacagctgcccatggggactcacacagccaggcctggggatggtcaccctggctaggtgatctcagcttccaggcaaggagccttccttgtgtccccagctcgtttggagcctctaggatgttgcctgctgtgggtcatgcaggagcctgggactggatagggacccccacaccctgagttagatgcctctcatccccatcagcagagggcatcacagcctccctgtggctaccttctgtatcccggaggcttggtcctccaaccccgactttgcgcaggcaacgctcacctccctgagggtcctcctgcctcctggtggctgactgtgctcctagccgtcctcgtcaccctcagacaggcagatgaaacccagacagtaatgcttcctcatcgcatgtcccctagcctgaccctatgaatgtccagaagacagtaatgcacccccagcacccaccccgctcaccctgctggcccctgcctgccacgttcctccctcttggcctccacggcaggcctctcctcctaatacctcagctcagggcccccactgggcagctcctcccgccaggatcccggggacattcctgcccctcctcccctgggccaaggctgcatgctggaggggccagatgggagggtgggagacctgggggtctgaggacccctgccagtgccagctcttccagctgacggctccacgtcttgggagcaggctttgattttgtgataggttgtgggctctcaggattctgcagttcaaattgtgccaggctccagagactctaagcccacccgggacacgtgttatggacatcatccccgaagcttatgaggacttggtgaggagacggtccccttggctcttccccagaggcttggggatcaggggtagagggaggttctggctcctcctcatagggggtgagaggttgagtcccagcaggggccagacctgggatgtggggttctccatgggattgtagttgggtttcctttttctgctctggagcaggcagaggctctgggacggggactgggctctggctgagctgggctaagggaagtgtgtccaccgaaggtccatgcggggggcaggtgtggcggggtgccctggggaccgcccagtgttctgtccctcagggaagggctgcagaggggcctgaaatagggatgttttgggggcagcccaaggggccctgagcacctctgctcctcccatcaggacaaggatgagctgcatgcccagaattccacgtttacactggctcctctggtgctttaaatgggggtaatgaggcactggaagctcccagtccagggaccctcctgccccgcactgcttggctcccccagcccaggggtccggcttccccaggaggacctggctcacccccacccagcaggaggcacaggcgggtccccacagggcacacaagccaggcaacacctgagagggggcatcccacagcagaggccagggcagaacgggccaggtctccacttggaagagcccggggaagtccaaggccctggggagcccctccctccaggagctacatccctgctgagatgagtcccctccatgaggagctgcaagacctcttctgacccagcctcatggtggcagctcatcccatggggacgggtccctggcactccaggggactgaaaccacagtgggccctgcttgggccaccagctcccagcctggaagggccaggtcctctcacacctgctgtccccacagatccccttcgggttcagcctgaagatgaagcatgcaataatggcaatggcgcccacggccttcgaggttcacagaagcaagtccccctgtgtctgaggtttcctggggaactcatgggacacagcctggctggcctgaggcctctgtccccatgaccttctgctctcatcagaagggatggccagggatggccaggcctggcctgtagggctgggcagggcatagtgggttctcccagaccctgagcccacccttgaaatgagtgatccatgtgaaaggtgggagtgtggtgggaacctccctgcccgggcctcccccggccatggcctcctgtgcacagctggaccccagggttggccacagaaggacccagtgctgctcagtgggaggtggcagtgttggaaacggggtgtgggcaccaaccccttccaggaacccctcccggcctgatgcccttcctgtcccttgagcgaccatgaacctgtcccagtccaccctgtgggagggagttctttcaggaccggtgctcccaggcctgggccctggaggatgccacagtgctcaggcactttgaggcctttgtgggggaactgatgagccagtgctgggatctgccaccccctcgtgggctccagcaccaggtcccctctcctaagtcatcctctggagcattcgatagtggagagggccccggccccaccagccctactacctggcccttcctcctgcacctctttttctgtcttttcctcctctacactaagcagcttctgggcaggtgctgagcgcatatgtactggacatgctgctcagacaggcagggactggagaaagaaccctcaacgccccctatgctttttacatcctctctcctctgtgcgagctccctaaccaccatcccaacatcgacagatgctgagaggagcaggggccgctcactccagaatccccctccaaggacgtcagggcaataagccttgagccaggggaaaaagagaatcagtgtcactgacccagaggacttggggagaggacacggataggagccctggccagagccagatccaagagttcagccaggtgcaggtgtgggaatggtcccgtccaggcatggagtggacggtcctggagggcaaagggggccccgtgcctgggaccatctcacccactgtggagatagtgtcttgtgtgaggtggcaagggggctaggtgacagccaaggcctctcccacctggttctgaattagggctgctacccaggccacacagccctgggatgaggaggtgaaggaggaagtctggagccagcctgaatcctaagccacagccccaggagtgacgtgaggtgccccaacagctccccgtgccctgagggatccacacacctcttgctctgtgatcagcagcctgcaggggtgtcctcagagtcagactcaagaagccacacagggatgctgaggacaccagagacccaggtctgtggggcccagccttgtgaggacttaatggacttggaggagaagctgaccgctcgcatctgctattttttcagccaaacccaatcgagggtccttggcacccaggcctctgtgagcataccctggcattgagcccctctgcaagggagatgggctggcccgcccctgcctaccagcttagctccaggggtccatgcagccagccccctaccccggaatgcaaccctggtcctctcccaccctgacctggctggcagtctccaagactgaggcccaggggcacgaaggagcttccagaaagctcagggcagcaggttgctctctggggatcctgagggttcagaatggacccatgcattttctgaactccctcccgaagctgcccagagacttggctgtcagaggcccgtggttcccattgtgcaattttgaacagggatgctgtgctccgtcccttccacatccaccctacacagccccaggaccatcagtggggcccagccctgcaaccccatcttggccacaacaccaggccctgctgggccccgtgagaactgagaggcaggtccagagataagtcccttgcatgggggcacttgcatcggacccctcttggtgggcaatgactagcatggcatggaaggagccagggcagctcccagccagttgctctgcagccccagatggctcctgggccttatgaagtccctctcaacagggaagctggtccctttcaggctgccagagggaggggtgaacgtggtgtcctcccagccctggccagccaggagcatgccctgtggcctctgatttgacttgttggacagagtcccctcccagggcacaagtcctaggtccagaggggcccggcctcaaccccagccctgcttggtaggggagggcaccggggtgccatgggcctttagctgcagcaccgatggccacgcaggggacatggcacacctcacccggttgttgtaccatttcaggtcagagaaccccggcaagaacttgctgcaggaacacgaggtgctgagcctgtgcgggagcaggacatcaagggctgctcaagagcgtccatggctacagtgactgtggcctcttcccagcctcatctgtgccgtgcaggtgatctatgactccaagctgggactggcaggtgatggtggccccagcatctcagccacgctgccaacatgctgtcaggaggcttcgaggccatgcccggtatgctgcccacctccttgagaccccttcctgacactttccagccggtgctacagccgcagcacgtgccaccactgaatacctttcagcagccggtgcaggcttcagacggcaggcgtgcccgacagccgtggcctcagcagctctttcgtggcaaccaggacagtcagggcagtgatgaagtgatgatgcctaggacgacaagtgggatggcagctccgtgatggtggatgagcctagtggcggttcacacctggtcctcagtggctccctgagcccccgtggtggcaacagcttggccaccatgaggcgcagtctcaaccgcttccccacctgtcaagtcaggcagggaggccttgtgcttggcgaggcgttgggctctgtgaaggacggggacaagctgtgcgtggctctgtggctctatggcctcaagtggcaggagaacccctactccttccagtgcactaccagcgacaccgctcagtagaacaagttcaagggcatgaatagcgtcctctcctgcaagctggtgaccacgcacaggcaggtcccagtgcacggcgcaacaagcacttggactggctggatgcgtgtctggtgacattcctggctatgtctgtgccccacctacctgagaagtgggccacgagctgcttccaggaggacttcatctccaagcacaggtagagcacgatctgcgggatgagctacacggccggccgcccagtgctggcgcagtgccacgtcctccagcacttcctgatgtgcctcagcagcaccgagagaaggcctggaaacaaggcaagaggaaggccttctgtatggcacagcacctcttgaggaaagaaaataagaaaactgcctccgatccaagcagagcaggtcagcgagaaggtgggcatcacttgggggagtggatgtgggtatcgaagacgaacactggatacgtggcctggtcatgggaggtgggtggtgcgagaaaggtgacatggtgggtgccagctcgttcctgaccctgagcactgcaccaccactgccctcgacctgcaggaggtggagagcatgattgacagcttcatatgctttctcaagaaggtggatgacggcgctgctgctcagccacagggcatggagttcacggcaagcaggtgaggggctttgagaaggagcatcggcagggggccagccctcccgcggcctcagccaggctttggagtgggcccagcaggccttctgggtgggcctgaaccagcccatcaaccttcaccggaggtgcctacaataccatcgtcaagctcttcccagattggcccagacaggacctggattctgtctcggacctgttactgctgtccaagcagcaacgcatcaaattcccagacatcctccacgttcacagaggagctcttaccaaagtcacggggagcaggagactcgtgggaggaggaatgatggaggtgcgggggctgatggcgttcaggagcgtgggacacgagttctttggccactttggctgaaattcaccatctccatccaattcgagggagaggtttgagatcatagatgcagcactttttaccagagcaatacatatttttccaaaaatcgatgtagaatttgaaagcagctctttataaagatgagagtgttgagtgactggatgttggattggggactttttccagttcaaggataatttccacagcagaataaaaactgctatcaaagagccatggccaactatttgtggtagtacaaggatggttttgtgctcaactgaggccagtttagaatagagaattatgtgggaaataaacagagaacatggcgatggaaccacgtgttgtaacttcgtaggcatccatactatggaagttccttccttctctccttcctgctgtctgtgcctcctcccagcatcgggcatctccatgtcctgggcctgtgccgggagagatataaaggacaccattggctataggctggaggactggcacggtcaggggagcccgtgaagtcagagtggcccctgaggaccagtcctgggatgactgggtccaactgaccaggcccctgctgaccagggccccatgcactgggcctctgccatgacctggccctcactgaatgggccctgatgaccaggaccccactgaaaagtccccccctgatgaggccccactgaccaggccttactgactgggctccccgtgactaggccccggctgactaggcagctgctccaccccccagccaagccaggcccccactgattgggtccaatcatcagtcagccagtggccagagctgcaccgaccaggtccccgctgatgagttacttactaaccaagctcctggaaaccaggttcgcactgaccaggcacaagaccccactgactaggtcttcatgacaaggccctcgctgcccggactccactaactaggcctcatgaatgagactttgactggtaatgtctttgctggttatgcctccactgtccaggcttccagtcatcatgtccccttgggccacgtccctcctgactgaacagtcccccagtgtctattccccgcactgactaggccctcacatccaagtcccactgaccagatattctggccaggttttcaccgactaggtcccactgccagactctaagaactaggccctactggccaggcaccctctgaccaggtttctgctgacaagaacctgctgaaaggtgttcgctgagtaggtcagtcctaaccagatcatccatgatcaggtccccactgatcatgtttccactgaccaggcccaaaaggactaggccccagtgaccaggcccatcactgagcaggcgctgctgacatagaacaggcccccactgtcaggcccccactgactaggccacaatgactatgtctcagctgaccaggccctgatgattaggtttaatggacaaaaccctcgttgaccaggtcccactggccaggtccccactgaccaggtccccatagatgagactctgagttaccaggaccccactgaccagacatctacagactaggccccaataaccaagacccactgaccaggccctcactcactgggctccaactgatgagattctgactgaccaggtccttagtgaccagactaggtcacttattgactaggccccactacccaggaccccaattaccaagcccccactaaccaggtcccaagtcaccagacccccactaactgtcccaactgacaaggcccccactgccgaggcttccactgaccaggtccacactgaccaggcctcgagagatgaggcccgacttaccaagaacccactgaccagagagacctccactgactgggcccaactgacaagggccccaccgacagggaccaactaacagggttccaactgaccatgtttttactgaccagactttactgaccaggccccacagctcagtatccagtgaccagaccctcactgactaggtctcactgtaaggcctcaagtgaccaggcctcactatccaggacacactcatgaggcttctactgccaggcccccactgattgggcccaactgaggaggccctcactgaccaggtccttaactgatgagattccaactgaccaggtccttagtgaccagacctttactgaccagcccctactaaccaggaccccactgaacaggtcctcactgacaagatcccagttgatcatgtccccagtgtccaggtttcactgactaggccccaccaacctggtcccctgacaagcctccaactgaccaggtctccactgactgggacccaacttacgaggcccattagccaggcctcactgaccaggactccactgactgggccccatctgatgaggttctgattgaccaggtccttaatgaccaggcctttactgaccaggccccactacccatgagcccagtgaccagaccctcactgaccaggttccacggccaggcctccagtgaccaggcctcactatccagaacccacggatgaggcttttgctgccaggctgactgcgcccaactgacaagattccaactgaccacttccttcactgatgaggtcccaactgaccatgtccttaactgacaaggttccacctgcccaggtcccaactgaccaggtccttaactgatgaagttctgactggccaggtctttaataaccagacctttactgacccattaaccgggaccccaatgacccagaactttactgaccaggccccactagccaggaccccaatgatcaggccccactgaccaggcctcaattgatgaggcctcaacttaccaggaccccagaccaccactgactagaccccactagccaggaccccctgatgaggcctccacttctaggccgccactgactgggctatactcacaaaacccccaatcagacctccagtgaccagtcctcactgtccaggacccacggatgaggcttccactgccaggcctccactgactgggcccaactgacaaggccccctctgtcaacgtctccactgactgggccttaaatgacgaggttctgactgaccaggtccttactgaacagacctttactgaccaggccccactaatgaggactccaaagaccaggcccccacagacaagaccacagttgattatgctcctggtggccacgtttcgctgactaggccccactgacaagtccctcactccctaggtccccattgaccaggccccaaatgatgaggcctcagcttactaggaccccactgaccagacctccactgagtaggccccactagccaggccccactgataggccccccaattccagaccccactgaccaggtccctccactgactgatgaggttcccactgaccaggtccttaatgatcagacctttactggctaggccccactacccaggaccccagtagccaggtccccactgaccaggtccctactgaacagacctccactgactgggcccccattgccagatttccactgaccgggcctcattgaccaggtttccactgaccaggaccccaataaccaggtcacactcaccaggcccccactgaccacatttcagctgaccaggcccatgctgaccaggacacactggtgtagccccaagtgaccaggccctctgaccagtcctctctgaccaggtccccgcagaccgggtcctcactgaccaggcacctgctcaccaggcttcctctgactaggtctccaatgattgtgtccccattgaccaggcccccactgaccaggtgctattgaccaggctgctgctgaccaggtcagcactgaccagacccccactcacaaggacctattcgccaggccctgctgaccaggtcccacatgactccactgaataggttccactgatgtggccccaataactcagctatattagtgtgttcttgcattgccataaaaaaacacctgagactgggaaatttataaagaaaagaggtttaattggctcatggttctaaaggctgtacaggaagcatgatgctggtatctattcggcttctggagaggccttaggaaactttcaatgatggtggaaggtgaaagcgtagcaggcacgtctttgcttttttttttttttttttttgagatggagtctcgctctttcgcccaggcggaagtgcagtggcgcgatcttggctcaccgcaagctccgcctcccaggttcacgccattctcctgcctcagcctcccgagtagctgggactacaggcgcccgccaccgtgcctggctaattttttgtatttttagtagagacggggtttcaccgtgttagccacgatggtctcgatctcctgacctcgtgatccgcccacctcagcctcccaaagtgctgggattacaggcgtgagccaccgcgcccggccacaggcatgtcttacgtggctggagcaggaggaagtgtggggggaggtgccacacacttttaaacaaccagatgtcatgcaaactctctcacaagaacagcgctaaggggatagtgctaaaccattaatgagaaaccgccccatgatccaatcactttccaccaggtcctacctccaacactggggattccaattcaacatgagatttgggcggggacacagattcaaaccatattgttccacctctggtctctcccaaatctcatgtccttctcatatttcaaaatactaccggctgcgtgcagtggttcacgcctgtaatcccagcactttgggtggccgaggcaggcagatcagaaggtcaggagatcgagaccatcctggccaacaaggtgaaacctcatctctacaaaaatacaaaaaattagccaggcatggtgatggaggcctgtagtcccagctactggggaggctgaggcaggggaatcatctgaacccaggaggcagagattgcagtgagctgcgatcgcaccactgcactccagcctggtgacagagggagactctgtctcaaaaaacaaacaaacaaacaaacaaacaaacaaacaaacaaactaccatgccttctcaacagtcctgcaaatatttaactcattccagcattaactcaaaagtccacagtccaaagtcttatctgagacaaggctagtcccttctgcctatgaccctgtaaaataagaaacaagtttgttacttccaagatacaatgggggtataggcattggatcaacattcccattctaaaaggaagaaattggccaaaagaaaggggctacaagcctacacaagtccaaaaccaagcagagcagtcattaaatcttaaagctccaaaataacttcctttgacctcctatcccacatcaagggcgtgctggtacaaggggtgggctcccaaagccttgggcagcaccacacttgtggctttccagggtttagcacctgtagatgctctcaagggctggccttgagtacttgtagctttttcaggctgagagtgcaagctgccagtggatctaccattatgatgtcaggaggacagtggttctcttctcatagctccactaggaagtcctccagtgggactctgtgtgggggctccaaccccacatttcccctccacactgccctggtagagattctccatgagggttccactcgtgcagcaggcttctgcgtggacatccagacttttccatgaatcttcctaaatctaggtgaaggtttccaagcttcaactcttgcactttgcactgcaatggtagtgcaggtccactgaaccatcaaagaccaggtacatgcctctgcctggtgttctcaactcatccaccagtgtggagctgtcatcccacttttcattacggtcatcatcgctgccctggctggcctggctgccaccagaattgctgaggtgatgactgcaggttccccagtccccggctctggaaagcctgcactggcagctggaaggcccctggtggtggcacttgttgtggctgcagcagcagctagagggctttgggaggcagcttcgaggaggtgggtaccatggtgagaagggccttgaagcctctgggtgacacattgccctagcaggctggggcaccagggctgctgtcactcaccaggcctggcctaggggcaatggagtgaggccttgtctctaagaagcatctgcatgacagaaaacatttctatactatacgtctgataatgcattaatatcacaaatgtataaaaactcaaacagtccaacagcaagaaaacaaatactataaaatattagcaaaggacttgatatagacatttctcaaagaagacatgcatatgagcaaaaagtacatgaacaaaagcccaagttcaataatcatcagagaaatgcaaattaaaaccagaatgagatgtcacctcacatctgttagaatagctatttcaaaaagtttgaagtgcactgagtctggatctttagtatctttatttcactacttcttctaatgtaaggatttggtttgttagtctttgatgtgtctttttttttgagatggagtctcactctgttgcccaggctggagtgcagtggcgcgatcttggctcactgcaacctccaactcctgggttcaagcgattctcctgcctcaacctcccgagtagctaggactacagacacgcaccaccacgcccagctaacttttgtatttttactagagatggggtttcaccatgctggccaggatggtctgaatctcttgacctcatgatctgcccaccttggcctcccaaagtgttgggattacaggtgtgagccaccacgcccggcctcaatgtgtctttttatggttttcagtaaagttttatggtttcacataggcctgggaatgtcttctaagtcgatttcatggcacgtttgctaatgtggatggaggctgactctttgttattgttactgtatgtttattattagtatgaaagattcaagatttattatatatacaatgtgcatttgctcaatttcctgaatgttgttaaacagtttttgttctgaaagttgaaatcgattaccctgcttttctatttgtactcatggcctctgtggataactacagttcaaattctttgacttacattctttcctgtttcctcctcttctctcttctggtccagactcaggcatccctcacagtgataaatgggagaggccttgccggcccttgtcttagacttttctttattgaaacacttctgatgtttgctgttgattatgatgtttgcacaaatatctttgcttaataagaattttatttttgccttttcccttccttccctcccttccttccttccttccttccttccttccttccttccttccttccttcctttcaaagcatgatctctgatgtttcttaggctggagtgcagtagctagtcacagatggaatcatagctcactgcagcctcaaactcctgggctcaagcaattctctcacctcagcctcctgagtagctggaactgcagtcatgtgccaccattcccagccagaagtttctattatcctatttggtattcttaatcatcacatattttattcaaggatatactaaagtgattacatattttttctactgtagtcttttgatcaaataaagaacctaaataatttattttttgagacagagtcttgctctgtcacccaggccgcagtgcagtggtgccatcacagctcactgcaacctctgcctcctgggttcaagcaattatcctgccttagcctcctgagtagctgggactacaggcgtgtgccaccacaccttgctaatttttgtctttttagtagagacggggtttcaccatgttggtcaggttggtctcaaactcccgacctcaggtgatctgcccaccttggcctcccaaagcattgggattataggcgtgagccactgtgcccagccttgattttatttttaatagtaaaatgtacttgaatagtttttggcgtaatctggtagtagaaatacacaagatatcaccattagatactgctaatcaaacacttaaaaggtgcaagtatccaggtgattttgtatacaatctgggtctttttgtcagactaacgagtataatgagatttgatatttgcttctgatgttgctggacaaactgggtaaagaaaaggattaagtcagggattccaagtttttaatacaagtactgcattaatatcctaaaaatttatatgtagccctgaagaagatacttaactcctgcagcttcagggctcaaaatgctgaaaagaaatcatagcatctcatcccataactggctgaattacaacaaaaattaaattcccaggcttgcaggatgcctacttttaaagtgggggtattcattcagaaaacattggatattaaaaagttaaaatgagggccaggtgcggtggctcacacctgtaatcccagcattttgggaggctgaggtgggaggatcacctgaggttgggagttcgagaccagcctggccaacatggagaaaccccttctctactaaaaatacaaaattagctgggtgtagtggtgcatgtctgtaatcccagctactcaggaggctgaggcaggagaatcacttgaagccgggaggtggaggtttcggtgagccgagatcgcaccattgcactccagcccctgggcaacaagagtgaaactctgtctcaaaaaaaaaaaaaaaagaaaaaagaaaagaaagaatgaaatgctggatcttcattggtttgctataaagtgattcaaaagctttgaaagatttgaatgataaagtgtatttttcctttaaaacatactcaactgaggaagatccaggagatacaccattcatcataactgtgagacatacatttgtgagaggagtcccagtatctccaaagagcttgatcaccacacttctctgtaggacagaacttacaatgaagattgttgccaccgaaatgaaaaatctaaatgcattggttataaccggatctcgggactgcaggatttaagtggcagcactcaactgcagctgtgaaaaaaatggtgggaatggttatttaacagactgcaaagtcaaagcaagcaataagaatagtttgactcatgggcttcctagaattagaatagagggcgcagtggctcatgcctgtaatcccagcactttgggaggccgaggcgggaggatcacctgagttcaggagtttgagaccagcctgaccaacattgagaaaccccatctctactaaaaatacaaaattagctgggtgtggtggcgcatgcctgtaatcccagctactcaggaggctgaggcaggagaatcgcttgaacccggaaggcagaggttgcggtgagctgagattgcactgagctgagatcataccattgcactccagcctgggcaataagagcgaatctctgtctcaaaaaaaaaaaaaaaaaaagaattagaatagacaggaagactactaagtttttacttgatctatataagtagaaaagttcaagtcaaacaaagccaaacctgaattatgaaacaaaaaacaaaaccaaagatttatggcttctcaattttttttttttttgagatggagtgtcactctgtcacccaggctggagtgcagtggcgcaacctcggctcaatgcaacctccacctcctgggttcaaacacttctcctgccttggcctcccgagtagctgggattacaggtgcgtgccaccacgctggctactttttgtattttttttagtagagatggggtttcaccatgttggtcagtctggtcttgaactcctgaccttgtgatccacctgcctcggcctcccaaagtgctgggattacaggtgtgagccaccacacctggcttggcttctcaattaatttccagtctcgaattagtttatagacccagaactccttgaatcaatgagatgctgggtccctatgaggaagaaatccagtatactattacaaatatatactgttaatttgtccccctcttttccccaaagaaaactatggccttttaccggagaacctttgcattgggaaaaaagaaataatcagacctttgaggaattactgaatacagtttctgaactgatactaattccaggagaactgaaatgacattgcagggcatttaccagagtaggagcttatggaggtcaggcgatcaatggagttttgaatcaattctaattcccagttggcctggtgggtttctcaaaccacccttcggttatcttccccgttctggaatacataattagattagacatactcagcaactggtagaatgccaaactggttccctgaccagtggagcgagagctattttggtaaaaaaaggtcaagatgaagtcatcagaactgcgtattcctaggaaaaagtcaaccaaaagcaacagcacattcgtacagggatttcagagactgaggccaccaggaaggtcttaaaagatccaagggtaggctgggagaggtggcactttgggagtgctgagttcagatttgggagcccgccgaggtgggcggatcatgaggtcaggagttggagaccaacatggtgaaaccccacctctactaaaaatacaaaaaaagttagccgggcgtggtggcatgcacctataatcccagctactcgggaggctgaggtaggtgaatcgcttgaacccaggaggcagaggttgcagcgagctgagatcgtgccactgcactccagcctgggtgacagagctagacttggtctcaaaaaaaaaaaaaaaaggaaccatccaagggtcatggctctcatttcatcctatgtaagtcactgaataaacataagagatcttggagaattatactggataaacgtaagcttaaatcatatggagactcccattgcagttgttgtaccagatgttgttttattacttgagcaaatatacacatccctggtacctagtgtacagctattcatctgcctaatacttttttttctctatcattgttaataaataccaccagaagcagttcgctttcaggtggcaaagacagaaacacaccgtcactgtcctacctcacacactagtaattggctcgggcttctgtaacagcatgccgactgagtgacttaatcaatgtattttcttctcacagttgcagaaggtagaagttataatcaagatcatcagaactggcatctggtgagatctctctccttgggttgtaagtgaccaccttctctatgtccttccatggactttcctctgtgcttttgtggtaagggagatctctaatgtctctttctcttcttataatgacttttttttttatagaaccctagccttataacctcatttaacctttttttgtttgtttgtttgttttgttttgttttgagacagagtctcgctcttgttgcccaggctggagtgcaacggcacaatctcggctcactgcaacctccacctcctgggttcaagtgattctcctgcctcagcctccctagtggctgggattacaggcgcccgccaccacgcctggctaattttttttatttttcatagagatggggtttcactatattggccaggctggtctcgaactcctgacctcaggtgatccacccgcctcagcctcccaaagtgctgggattacaggcgtgagccaccgcgcccggctctcatttaatcttaattacctccgtaaaggcctatctccaattacagtcacattgagggttagagcttcaacatatatattttagagggacatagttcagtcaataatagtgatatatcaactcttcagccttatgttacagcttagtttgctgggatcttggtcaccttttccttccacaaactatcacactggttctttacattgatggtattatgctcattgaatatagtgagcaagaaactcactagacttattggtatgagaagctcactctagacttactggtatgaaatttatgtcaggatgtaggacattaatccaacaaaatttcagaagccttctatctttgtgagatttatagggtcccaatggtttgggacatgccaacgtatcccctggaagcagaggagtaagttgttatatttggcttctactacaacaaaaaagaggcacaactctagtgggccttttgattttgaaggtaacatatttctcatttggtaagttactctggcccatttaccctgtgacccaaaaagctgctagcttttctttactcagcagaaaagaatattctacatcagatccaggctgtcgtgtcacttgggtcatgtcttccaatagagtcaaaggtgctgaaattgttgatggcagatacagatgatctttggagcttctggaaagctcctgtgttaatcacaggaaagattttggaggaaaatcatgccatcctatgtagataattgctctttttcttttcttttcccttctcccctcccctccccttccttcctttcttttctttttttctttcttttttttttttgaaacagcttttggcctgttcctggggcacagaaaatacactggaaaaatttatattgttaaaatgtccatgctggccaggcatggtggctcatgcttataaccccagcagtttgggaggccaaggcaggtggattgcttgagctcaggagttcaagaccagcctgggcaacatggtgaaaccttgtctctacagaaaatacaaaaattagcccggcatagttttgcatgcctgtgattccagctacttggaggctgaggtgagaggattgatttagcccaggaggttgaagctgcagtgagccatgattgtgccactgcacttcagcctgggtgatacagcaagaccctgtctcaaaataaaataataaaataaaataaaataaaataaaagtccatgcttcccaaagtgatatagaaagtaaatgcaagccctatccaaaccccaatggcatttattattaaactagacaaaaataattacagatttacttggaaccaaaagagaccttaaacagtcaaagcagtattgagcaagatgaacaaagctgacgatattatactctctgatttcaaaacattagaaagcaatgccatcaaaacaagatagtactggcataaaaacagacataaagaacaatggaacagaatggagagtcccagaataaatctaatatatgcatacaatcaactgatcttcaacaagggtgccaaaaatacacaacagagaaatgagagtcttttaagtaaatagtgctggaaaaattggatctctatatgcaaaaggataaatgtggactcttacttcataccatattaaaaattaacttaaaatggattaaatatttaaacataagacctgaaaacataaaatggctagaaaaaaaatatggaaaaattttcagaactttggacattgagatgcttttttttaaattagacttcaaaagaacaggcaacaggccgggtgtggtggctcacacctataatcccagcattttgggaggctgaggcaggcggatcacctgaggtcaggagttggagaccagtctggccaacatggcaaaaccccatctctactaaatctattttaaagattatttgggtgtggtggtgcactcctgtagttctggctactcaggaggctgaggcagaactgcttgaacctgggaggcagaggttgcagtgagccaaaattgcatcactgcactctagcctgggcaacagaatgagaccctgtctcaaaaaaacaaaatagtaagacaaagaacaggcaataaaatcaggacagacaagtgggactacctcgaatagaaaaacttctgaacaaaggacaaattcaacaaatgaaaaggcaacttaaggaatgagaaaaaaatagttgccaataatatatctgataaagggttaatatccaaaaatacaaggaatttctacaactcaatagcaaaccccaaataacaagattaataaatgagtaatgacctaaataaacatttctccaaagaagacataagaatggccacaggtatattttaaaaaatgctccgtgtcattaaatgtcagtcaaatgcaaatttaagtcacagtgaggcatcacctcactcttgtgaggacaggtatattaaaaacaaacaagcgtgctaaagttatgaagatactggaacttttgtacacagctggcaggaattaaaattggcagcaacaatggaaaacaacatacagttgtctcaaaaagttaaaaacagaattataggtcgggtgtggtggctcatgcctgtaatcccagcactttgggaggccgaggtgggaggatcacttgaggtcaggagttcaaaaccagcctggccaacatggtgaaaccctgtctctactaaaaatacaaaaaaaaagtagctgtgagtggtggtgcgcacctgtaatcccagctactcgggaggctgagacaggagaattgcttgaacccgggaggcagaggttgcagtgagctgagatcgcaccactgcactaaagcctgagtgacagagtgagactccgtctcgaaaaaaaaaaaaattacagtttgattcattaaactcaattctggggatacatccaaagggaatataatttggatcttgaagagctacatagttctgtgtctattacagcattattcacaatagccaagatatggaagccacctaaatgtccatgaaggatacatgaatgtgtcaagtaaaggtagtatatacatgcaatagaatattagccttaaaaagggagtaaatcttttcttttcttttttttttgagatggagtctctgtcacccaggctggagtgcagtggcgcgatcctggcttactgcaacctctgcctcctgggttcacaccattctcctgcctcagcctcccgagtagctgggactacaggcgcccaccaccatgcctggctaatcttttgtatttttagtagagacggggtttcaccgtgttagccagaatggtctcgatctcccaaactcagctgatcagcctgcctcggcctcccaaagtgctgggattacaggcgtgagccaccgcgcccggccagtaaatcttttcatttgtgacaacatgaatgtacctgaaggatactaaggtacacattaaggcacgattgaaagaagccagacatagaaagacaaatacatcatgatctcacatacatgtgaaatatgaagtaattatacgtgtagaggcagagagtagaatggtgttttccagaagctgagctgaaagaaaaacgggggttggggggatacaaagtttcagttacccaaaatgaacaaactggtctggatagtggttttttttttttttttttttagtaaaaccataaaagctcaggcaacgaaaacaaaaacaaatggggttatatcaacccaaaatgcttctgcatagcaaaaaaaaaaaaaaaaaaaaaaaaaaaattaacaaggtaaagagaaaagctacagaatggcagaaagtattttcaaaatacccacccaataaggtattaataaccagaatatacaaagaactcaaatgacttaatagcaaaaaacaaacaaaaaaagaatctaaatttaaaatgggaaaggatctaaccagatacttctcagccaggtgcagtggctcacgcctataatcccaacactctgggaagctgaggcgggtggatcactggagctcaggaggtcaagaccagcctgggcatcattttttgtagaggtgaaataccacctctacaaaaaattcgctgggtatggtggtgcacacctatagtcccagcaacttgggagtctgggatgggaggatggcttgagcctggggaggttgaggctgcagtgagctgtgattatgccactgcactctagcgttggtgacagagagacactgtctcaaaaaaaccccaaaaaacaaaaagcaaacccaacaacagactcctgtcttcagccaaaaagaccaggaaagacaccttatcaaacaaaacttttatccaatgtgccttctatgctgggataaaatgagggtagatacaataggctttctttcccttttgtgttttataaattgtatttgaatatcaaggaacaattgaaacattgttaactacgataatttctgaatataatgtaatacgttgatctaacactaaaaaagctatactcaaaaacactacaaataaatgaaattttaaaacatgttcaaattatctacatgaagaaagtaaaaatcacacagaggaacaaaacagagagaacaaacagaaaacaacgtatcaggctagttttaacaaaattaacttaactgttaaatgttctgaattaaccaagtagatctccgctgacacacaacaaaaacatgctggccaaagtggatgaggtgaagttcacaatcaacacccaaatgaagaaggtgctatgtctggctgtggctgtcagccacgtgaagatgacagacgatgttacacacagacgatgtgtgtaacattcacctggctgtaaacttcctgatgtcactgctcacggaaaaccggcagaatgtccggcccttatataacaagagcaccaccggcaagccctagcacctgtattaaggcacatttgaataaattctactgccaccagtcaaaaataaataaataaaataaaataatcaattagagacaaagattgaaaacattgattttttttttttttttgagacggaatctcctctgtcgcccaggctggagtgcagtggcgagatcttggcttactgcaagctccgcctcccaggttcacgccattctcctgcctcagcctcccgagtagctggcactacaggtgcccgccaccacgcccggctattttttatgtatttttagtagagacggggtttcaccgtgttagccaggatggtctcgatcttctgacttcgtgatccgcacgcctcagcctcccaaagtgctgggattacaggcgtgagccactgttcccggcctgacaacactgattaataaatatgaccatgcatattctctttagaagaaactcacttccaatataaaaaggtaaatttagaataagccctctccctctccccctccccctccctctcccctttgcacggtcctcgtctcccctttgcacagtctccctctgatgcggagccgaggctggacggtactgccgccatctcggctcactgcagcctccctgcctgattctcctgcctcagcctgccgagtgcctgcgattgcaggcgcgcgccgccacacctgatggttttcgtattttttggtggagacggggtttcgccgtgttggccgggctggtctccagctcctgactgcgagtggtctgccaccctcggcctcccgaggtgccgggattgcagacggggtctcgctcactcagtgctcaatgttgcccaggctggagtgcagtggcgtgatctcggatcgctacaacctccacctcccaactgcctgccttggcctcccaaagtgccgagattgcagcctctgcccggccgccaccccgtctaggaagtgaggagcgtctctgcctggccgcccatcgtctgggatgtgaggagcccctctgcccggccgcccagtctgggaagtgaggagtgcctcttcccggccatcatcccgtctaggaagtgaggagcgtctctgtctggccgcccatcatctgggatgtggggagcacctctgccctgccgccccatctgagatgtgaagagtgcctctgcccggccgcgaccccgtctgggaactgaggagtgtctctgccccgccgccaccccatctgggaggtgaggagcgtccctgcccggccgccccgtctgagaagtgaggagcccctccgcccggcagccgccccatctgggaagtggggggcagctcccgtccggccagccgccccgtccgggaggtgtacccaacagctcattgagaacgggccatgatgacaatggcggttttgtcgaatagaaaagggggaaatgtggggaaaagaaagagagatcagattgttattgtgtttgtgtagaaagaagtagacataggagactccattttgttctgtactaggaaaaattcttctgccttgggatgctgttaatctataaccttacccccaaccccgtgctctctgaaacaggtgctgtgtccactaagggttaaatggattaagggcggtgcaagttgtgctttgttaaacagatgcttgaaggcagcatgctctaagaatcatcaccactccctaatctcaactacccagggacacaaacactgtggaaggcggcagggccctctgcctaggaaaaccagagacctttgttcacttgtttatctgctgaccttccctccactattgtcctatgaccctgccaaatccccctctccgagaaacactcaagaatgatcaataaatactaaaaaaaaaaaaaaaaaaaaaaaaaaaaagcagaataaaatcagaaaaaaaaaggtaaatttaaagtataagaagctgggcaaggcgtggtggctcactcacgcctgtaatcccagcactttgggaggctggggtgggcgaatcacttgaggtcaggagttcaagaccagcctggccaacatagtgaaaccctggctctactaaaaatacaaaaattagccaggtgtggtggctggtgcctataatcccagctacttgggaggctgaggcaggagaatcgcttgaactggggaggcagaagttgcagtgagccgagatcacgccactgtactccagcctgggcaacagagtgagactccatatcaaaaataaatttaaaataaataaataaagtataagaagctggaaaaagatacaagtaatcaaggaaagcatgagtagttacaataatatcggataaagtagatttcagagaaaaaaattgagacatggagagaaattacataatgataaaaagcttaatccacccagaagacccagcagtcctaaatgtgtaggcataaatcaacagacatgaaaaatgtgaaacaaaaactggaacaaacagaggagaaacagacaataagacaaatacacaattatcgttggagatattgacatttttctctaaacaatagaacagagaaaatttcagcagcaaatctaaaaaaaagacaacagttcaacaccatcattcatcaacaggatctggttgacatttgtagagtaatttaatcaacagcagcagcatatgcattctcttcaagggctcatggaacataaagtaagatagaccatctcctaggccatgaaacaaacttcaacaaattttaaaaatcagattacacggagtgtgttctcggatcataatggagtcagactagaaatcaataatgtgaagacaatgcaaacatctccaactcttgcaagcttgaaggggaagtccctgggaaaacaaaaaatacattgaccacaaagatgatgaaaagacaatggatcaaaatttgtaagacacaactaaagcagtgtactgaagaaactgatggcactaaactcatatattagaaaaggctggtcgggcgcggtggttcaagcctgtaatcccagcactttgggaggccgaggccaggagatccagactatcctggctaacacggtgaaacccggtctctactaaaaatacaaaaaaaaaaaaaaaaaaaaaaaaaaaattagccgggcgtggcagcaggtgcctgtagtcccaggctgaggcaggagaatggcatgaacccaggaggcggagcttgcagtaagccgagatggcgccactgcaccccagcctgggcgacagagcaagactgtctcaaaaaaaaagaagaaaaaaaagaaaaaaactaagtctccagataatctaattttccacatcgataacctgggaaaaggtcaaacttaataaactaaacccaaacaaaagaagtattaagaaagaaataataaagataggaagagaaataaagttgagactcagaaagtaatagagaaaaaccaataaaacagacagctgattttttttgaaaagatcaattaaatagacaaacctcaagcaagactaagtgggggaaaggacaagacacaaattaccctgtcaggaatgaaacaagggatatcggccaggcgcggtggctcacgcctgtaatcctagtactttgggaggctgagtcaggtggatcacaaggtcaggagttcgagaccagcctggccaatatggtgaaaccctgtctctactaaaaatacaaaaaataaaaattagctgggcgtggtggtgggtgcctgtagtcccagctactcgggaggctgacgcaggagaattgcttgaacccaggaggtggagattacagtgagccaaggtcgggccactgcactccagtctggctacaaagcgagactccatctcaaaaaaaaaaaaaaaaaaaaagaaacaaaggatatcattacataccctgcagacataaaaagaataataaagtgtattagtcgtctagggctgccataagaaaataccagagtctgggtgagttaaaataaatcatctcacagttctggaggctggaagtctaagatcaaggtcccaggacagctggtttctcctgagccctctgcgtatggcgccaccttcctctgtatcctcacatggcccttttctttttttcttttcttttcttttttttttgagatggagtctcactctgtcaccgaggctggagtgcagtggcacgatctcggctcactgcgacctccgccccccaagttcaagcgattctcctgcctcagcctcctgagtaattgggattacaggcgcctgccaccgcgcccggctaatttttttgtatttttagtagagacggggtttcaccatcttggccaggctggtcttaaactcctgacctcgtgatccacccgcctcagcctcccaaagtgctgggattacagccgtgagccaccgcacccggcagggctttttcttctaattggcccgttctagtgtttctctgtcccttctcctttattttatttatttattcatttatttatttattgagacagagtctcgctctatctcccaggctggagtgcagtggcacaatctcggctcactgcaacctccgcctcctgggttcaagtgattctcttgccttagtgacctgaatacaggtgtgggattacaggtgtgcgccaccatgcccagctaatgttttatttttagtagagccagggttttgccatgttggccaggctggtctcaaactcctggcctcaagtgatccgcctgccttggcctcccaaagtgctgcaattacaggcgtgagccacagtgcctggcctctatctcttcttatcatgatgatagtcatactggattatggcctcactctgatgacctcatttaacctcaattacctcttaaaaatctccctctccatacccagtcccaatgagggttgggacttcaatatgaataactctatacacataaaatttaacagcttagatgaaatgatttaatcactcaaaacataaattattataattacccaattaaaaaactgatatttttgaattgccctacactaggaagaaactgaaatcataattttattttttatttatttatttatttattttttttgagatgaagtctcgctcttgtaccccaggctggagtgcaatggtgtgatctcggctcactgcaacctttggaataatgttcatgagcccaaagacaagacaacctttggaataatgtccatgagcccaaagacaaaattcccagcttaataaatggcccaacagcatcagaattagaagatttagaagtaactagaattcttcctagctccactggaaaggatgaacatgggggctcccgcaagataagtacagggccagtggacagtgactggtctagtgagaatagaatcccaaagatcctgggaaataaaattacacaacaagcttccaggaaacaagtggaacaaacgaggcaacctcgcagatactaccaggaatggataagcagaagagggtcagagccacaaaatctaaacaaaagacaccaaaccacaagaagcacccagccctgtgaacaccagctgtggctacatctgtaccaatcttttcagacagctgccgtgggactgctgagagcagccacacaccaaacagcagtgcatctgaacacaagtcccaagacactcctctctattaatcctcattttgagaagatggatatggttatgttacaacatccccatacaacacttgtgggcgagggtaatcagacaccctcacctaaagagggcacaggaaggaggaggatgaaaacagagggctagggaagggatgtgtgctctggatcacatagactttccccacaggcactatttaaaacaaaagaagagccctagaaatgtgctgtggtctccctatacttcctcatcttgccacatgcataggtgccacgtggttttgttttgttttgttttttgagatggagtttcgccctttcgcccaggctggaatgaagtggcttgacctagactcactgcaacctccgccccccgggttcaagcgattctcctgtctcagcctcccgagtagttgggattatagcgcctaccaccacgaccggcaaatttttgtatttttagtagagatggggtttcgccatgttgactaggctggtcttgaactcctgacctcaggtaatctacctgcctcggcctcccaaagtgctgggattacaggcttgagccactgcgcctggcagatgccacaatttttttttctttctttacacaggtgctgatgaactcaggtgtaattaaccctaaggggtaaattattcactaagtgcagtaatagggtccaatttttatgaccaggttttcagttctttgatattgtcctacattcagaaatcacaaatgaaaaatactggaatgtgtgacgtgaacaatgtcttggaggttaacatccaggtttttacatattagatgtaacaacatgaaagctggtaccatctgggaaccaaaggaactgtccctgagaacacagaattttagggacatcaattattaagagtttacatggaagcagaagtgctcctagatgtttccattatctagatagaaaaattcaacagatgagccccagtgagtcaaggaacatctctgacagctgtgggtgatgggctttctatccaaagcagagatgtgaaacctgacgggtttcaattgaccccgaagtgctccatatctcaaaagtcaatcccacaaagctggaacgctatctgttcctgagggatcaggtcccacctgtgtctctaagacactgccttgagatgaggccgatgatttcaaacgtaaattgcctaaattatcatcagcttcatgttgtgttttggagcttgtccacttaagtgggttgataaaaaatggctcacaagacacatgcctgggaaatggggttttcttctttgctcttggcagatcctgggcaaccctataattaaccttcttgatttctcaattttcacattcgcgaaaaaggtgccagtgcgcgtgacatttccctgaagccacagcccttgtcaccccctgcaaagctctgaagttgtgcacaggtaggccaggtggcagatttctctcaaaagcggctgagctcgcgctctggctagggaaggcagaggcctgcggcacaaagtacattgtcttagacatcaggacagtgtctatagcagtttaggaaagaaggcggctccctgggctggagacgacgcaatgctctgggaagacccctgggtgcgggtgagagaggaatccgagctgcacaaggccaatgaggggaggacgacccgcccgatttagataaaggtaaggcatacttcctagcttaataccctcctcaatgcccagcccagacctgcctttcacgtccctagctgtattcactctccctggcgaccgggcggcgtagaatcggcggccagcagtgctttagacacaggttaagtgtctgcccctccctccagggttacgcaccaccccgatgcatactgggattgtagttctgaagctacctacccatgggctgagagcagtaaagagactacaactcccagcataccaggcgcggcgcgcaccgccctgccccttcctctggggttgcgaaccgcccccgagcctggtacaggctgggattgtagtcctgcagccttgtggccgaagggctgggactggccatgagattacatgtcctagcatgctcagccaggcgcgcgcagctctgccccttcctccagtgatgcgcacagtccctgatccctgtgcacgctgggattgtagtcctgcagccctgcgatcacttgcaggtaacaagaaatttcagcttccggcatgatgggcgaaggcccccaccttcagcctcgctcctccatgccttcagagctgttccgccatgcagacggggagcctgcctgttctttaacctctcctacctgatgggagaggacaagctaccaggacagcttgtctcaccaagaaattgtgataccgcatcccccaacgtgctggcttcctgacttccaaagttgcggtaagtttgatttctcacagaactgcaagagtccgggatcgtttcccagcctgcccaaagttgccatggttctcaccctctgggaggttggcacacccagtgacaccttgtgtcccttgaaactaatctgtgtcaccttttaggcttttgagaccacttgaactctgactttgtggcatttattaccaaatctactaaaatgggtcaactgtcagattttaactccttttccacacatgttggttaggtaatctgttgattagacatggttttctccaaaaggggattatctcttcctgattgcctccaagagaaggatgaaacgattgggcgctctaaggatctatttcccaaatttgagattccacactgatcattcctgggcaaaatgtgtctttctgttccataaccacaatcttaggccagcctgagtgccatcccagcccaatgggggttatggaactccaacttagttctgtttaagttttatgtaaatatccttgtctctgtttcacctggctctgttagataaaatgtctaggagaaagtaggaggtgacaagaatacaggtgaaatcataggtactggaatggggcacactgattctgtggaagcagagggagaacaacaacctaaaacccagggaatgaacaacttagacctcaggagctgtggggaatggaggggcattaataactttttgtctttctgaattacccctggtgcaacccagaaaagagtctgggaatcttgttgggccaggacaaaagtagttttagttagaccagaaggtaaggcacaagctgtgaattcatctcctcctttggctccccacattaaccttaagaatcctttgagactgttctgtctctctgtgatgtaggtgtggaattctagggggcagcgtgcactctcagtgcccagctgtctgagaccacagttccctcagatgatgaatgatatggtttggctgtatccccacccaaatctcatcttgaattgtagctcccataattcccgtgtgatatgagagggacctggagggaggtaatcgaatcacgggtgtgcatctttcccaagctgttctcgtggtagtgaatatatgtcacaagatctgatgattttatagagggcagttcccctgcacatgctctcttgcctgccaccgtgtaagacatgacttcgctcatccttgccttcctccatgattgtgaaccccactgccctgacctacagccatgtggaattgtgagtcaattaaacctctttcctttataaattacccactcttgggtatgtctttattagcagcatgagaacagactaatacaatggagaaccatcgcttttttctgaagagactcagtcccccatgggtaagcttaagctggacgctaggcagcactgattatattttctccttctgtgaactggagctcctccttccattttcctaccaccactaatctttttggtcaatatttggataaattagagacatagataagggaatgttagccccagcatagctagactcttgcttatttctcttcccggtttatgaaatcaattatgttggcacagagagatacccttagatggggtcactcaggagcaattagagcagtgtacttctagagaagctgataggacagggcagatgtgccagtgaggatcacagcttctgtctaaatttttgagtctatctgtgtgtggcagatgaattcaggaaagatcccagatccctggaaagggaccattaagagaggattcatgtagatcagaacactagggcatgtgttcatcagtgaccttctaagtcagattgacagggttaagtctgtggtagggctacagagcaatgcttgcccatgaaagcctctgatcatgtgtaaaatatgtggttctggcacggggagacatctttatctgacagaacattgtacttctgtggatgtgggattctttgctcttccttaacagtgcaccactgactgattgtttgagaatcacgcatacataggcctgtttattttgaatttcttaaatattggaacaggaaaaaacatttttatccactttttttcttttttttgagatggagtcttggtttgtctcccaggctggagtccagtggcgcaatctcggctcactgcaacctctgcctcccagattcaagcgattctcctgtctcagcctcccaagtagctgggattacagatgcgtgcctccatgcccagctaatttttagtagagacggggtttcatgatgttggccaggctggtcttgaactcctgaccttgtgatccacctgcctcggcctcccaaagtgctgagattacaggcgtgagccaccacgcctggcctttattcactttcaaattgaataagagcatgagcaacttcagggaaaatgtcacgggaggaaactctggggccctgcccatccccagaaacctcagaaatcctgatacaacctgtagaattcaccttatcaacactgattcatttttttgtatagatttatctttcattgggcctttattttgttctatgtcatgaagaacatgaagaataagtcatttctttcctttgtggtaggaacatcaatttttcacatgtcaagtattaatgatgccatcctccacatagtttttcttgtttattaaatttttggtttggtctaaatatttgtgtccccctccaaattcatatgtggatagtattaggcatgcgacctttcgggaagtgactaagccaagagagcgccatcttcctgaatggaataagtgccctttttaataacattgaagggagtgtccttgtctttcgccatgtgaggacacaccaagaaggtatcatctatgaggatcagggctgtcatcaaacaccaaatttgttggtgtcttgatctagcactttccagcctccagaattgtgagcaataaatttctgttgtttttacattacccagcctaaggtattttgttacagcagcctgaatggactaagacactttcttaggcactttagtctatttctgaatttttagttccaattatctattagcttttatttatttatttttagacagagtcttgctctgtcacccaggctggagtgcagtggcacaatctcagctcactgcaagctccatctcccaggtttgcgccattctcctgcctcatcctcccaagtagctgggactacaggtgcccatcatcacgcccagctaattttttttgtattttagtagagatggggtttcaccgtgttagccaggctggtctcgatctcctgacctcgtgatccacccaccttggcctcccaaagtgctgggattacaggcctgagccaccacgcccagctgatctattagcttttttaatcaagatttttcacagggctggacaatattatctgttttttttttttttgtttccccagagttttcttggctcttcttgtcttttcatctatatgctgttttattttatgtatgtatgtatgtatgtatgtatgtatttatttttgagacagagtcttgctctgtcgcccaggctggagtgcggtggcaccagcttggctcactgcaacctccacctcacaggttcaagcaattctcctgcctcagcctcctgaatagctgggattacaggcacctgccatcatgtctggctaatttttgtattttcatagagacagggtttcaccacgttggccagcctggtctcaaactcctgacctgaagtgatctgcccacttcagcctcccaaagtgctgggattacaggtgtgagccaccgcagccagcctatatgctattttatagtaaaatgcctacctccaatatctaatggtatctatattagaacaaaatttattttataaactaccttgaggacaatttatattgatagtatattgtttttcggtctaagaacatgtaatttttctatttgcttatgtctacattcatatattttatgaatgtcgtatgtcttttctcattctgtaaacctttgtgtaatatggattcctagtttattttattcctctaaaaagtaatctgagacacaataaaattgtaaagagtttatttgagtaacagcaattgattaattataggacaccagtctaaaagaggtttaggtttcactgacagtgtaagaggcaactatttattggaaaaatgtagaaacaaattatttgattagtggtagttacaaacttgtttcttcttggttttttgtttgtttaccttgttgaaaagtccctagttatataaggttgttggctacttctgattggttgagcttcatttctgtttttctttaaaataggcagctataagaaataattcaagttaagtttagccaggcatggtggcttacgcctgtaatcccaacaccttgggaggcggaggcaggtagatcacctgaggtcaggagttcgagaccagcatggccaacatggggaaaccctcatctctactaaaaatacaaaaaaattagctgagcatggtggcaggcgcctgtaatcccagctacttaggaggcccacagtctggttaaaactccaactgccattttttctctttctgacacataaagtgtaaagggttttgtcaggtcaggtagccccagggctggcgccgacatgagtttttcttttaactcacgaaaagctcgttgctgttggttgtaatagatgtagtttatccaatttacatttttattaactgtcacccaccaaaatattgactcgaatcctgcagctatttgatttcaagctttaaattgatttggtattccccatgggactccagttgcatctaaatagacgtgagagttgaaagacccataaggggcttctctcgctttacgatgtcttatttttcttccctctggttgatgaaatgccagggtgaaagggatagccaattggactaaagtacaagtgccactccagttattggcagaatgcccagtaaaggtctaccacaatatcaccacacattagctcggggatgaacaagggctgattgataagctcttgaaaattcttaagctcactgcatcccttcaggtctccaaggaacgctaagtttttctccctatcatgagagacacaaagtgaacttagtgttgggagatggaggctggatggccctcggggactgacctgcagggtgccggactttgggatatagcagggagagcttggcacgacttattactccaggctgtagaatcctgaaaaagagctaccatgcagcccatgcctggtcaactggaggactaccttagtggaaaggggacaatctgggcctctggcctgccatgtgcacaagcataacaattgcttttgtttaacgtgggatggaatatttgatccattccaaccaggcatttgcatgttggtatcctgtcttaattgccaaagttcgttttaagtctttaacttatatgatcctctagtaaaatgaatgcatgattttagggaattacaaaaaccatttggggcagtccacacttgctctttagtggtccacagaatgttggaccaactacagcataaaagctctacgttggggagcaagactcctggttgacactggagtctttatcaaaatttccccagattaaatagtcctaatttactaatgcccagtctgaggagagtcaggggggacagaggtacttttctgaagtggagagctgtctttcacttgagagtccccacagggtataacaaggcaagcattaaatgcaatagtttgaggcaaaattgacttggttatgttaataactagatggtcagcaatagaatgaggaaagaagaaagagtaatagaacagattttgaaagagttaaaagttttcttagctttagtttggtagggttttcccctgggactatggcccaagactctggagggggcggtgctttcttgactcagttgtgatgagtccatcctttttccattgtacgaacagcagtctcagtggttagcagcacaaggtaggggccttcctagcctggctcctttcttttcaccttttgatgagaatgtgatctttaggctggtgctggtttgctggaaattctaggggtggtacatgtgctaaaagacttgtagttttgaggtaaaggaaagtggaagataaaccaagtatataatttctaagaaactgaccttttgttttaaatgtggggacatcagcagtggactttatagtctttggtgcctttctactgagaaatttcttttagcacctgcttttattagtttttagaccaaagaaagccaaacaccattatatatttaataatgcttcttgtatgatttttataccagataagctaaatttcaccattatattagtgtgttattaatgtgaaacttaattttaataaaaccttgtagatatatttatccaatttttaatgtcagaccataaggtaagatttttatagactctttttaaccttttataatttttgttaaagagtacgttagtgctttaagaaaaacccgttgtgtttttattttaatgtccagttcacaaaaaaactggatgatacccctttaactttagctaatatgtttacacacagaattttctttaaaattaatgtttaaaaacttgcttaaaccttcaaaacaataatttttttaaccttttaatgtaggtaaaaatttacattcttatgcctccttataatccttttaccaaaggtatattttactttccttatacaccttgcacataaactgtttttttcaatagttttacattcaggaggcctagctacttttaaattatacaacatttcttgcataaattctttttttataacatttttctctttcatgacttttgcagacaattctttgacgtgcctcaactttctgacttattacaaacctttctttctttaaacaaccagtttctttatttcaggacaagaatttaccatataacactctttttacataaattcttcccccacttttttcccttttttttcaaagatgataaccattcttttccaaagtgaacttcctttatgtctgtggacgagactgtctaaggccacaagattagaagttactataatacatgttacactgttaacttttagcaaactttacttttgttgaaaaccttgtaagtttgggattttaattatcctttgccattaataagaccttgttttgtccaaattaatttagaattggtatagatggctttttttttttccttcaattacctgggaggaacgattgatcctcctgtcctgaagggagttcctcctaggtctggtcggacctttgtatggtaattaagatttagatgccctgttaggaaaacttctgggttaagggaattttcagtggttaatgttaaatcacacttttttttttttttccttaggatacttctgaactggtgaggtgtgctcacaatgaggtttcctcacaatgaggtttcctctaaaagttatttttttactttcttctgttagcaaagcagttgccgctacagattgaatgcatctgggccatctgcgggttactgggttaaggatttttgataggaaggctacgggttatcagtggcctcagtgctttcagaatacgcccttgtttacactgacaacaaagtggtattggagtcttatagggttatggagaataccttcaattatcaattataggttttaaatttaccctggcttttaaaggaatagggtacacttttttcttaactacttgtatatctctctttctttctctgattttctttttctctttgactttccttttgcctctgtctctttctctttctctgcctctctctctctttccttgactccctctttatctctctgtctcttcctctttctctctctgctggtctttccttgcctctgcaagcttgcttatgctgctgttctctcaaccattgtggggtgggggtctaaaaccagctataaccaagtgtccatgtacaggaactggtctgggtgccctggcttacaggttaccttgtgccgtacctttgaaacaagggacctgtccaatcttccttctgatggccaacccacctctaatgctggccagtctatttcacacaaagttctaagttttcctggtatcacagtaacactgtaatctcccttaaatcctttcttgaaaattttcaacatagctcctactggggcaggcttactttgtgcctgacccatgcttcttcaagacaaaacaccacgctcgcaccacacgcacaccacaaaacaaataacgggtaaaaagggcacacacatacttttacagtttacaccaaaccagaatcaataccaaaatcggggtatctagaaatccaagcaaggtcaaaaccaaaaccaaagtatcaagcaatccaagtcaagtcaaaaacaaaaaccaaagtgccggtacaggcacgccataggtgatcaggccacacttccactcaaatggagtgggcaagttccaaagactagtcttaccaagtttcagatgtccagactccaagtgccagttccttcccggtgttcagtcactgcattgatcctccgcgggggctgccacacgctgctctggtgaggcgttccaccagggaatttgcttacccgggagcgctctcaggatccgcatcgctcaagctggccggagtcccccgcagggatgctccacagggcaggcctaagccgcctaacaggctgcctcaactgtccgttaatcacctcgcttcccagtcagggaaccaagaaatgtagcaggacgagccgtagacaaaacccctcagacaccgagttaaagaaggaagggctttattcggccgggagcattggcaagactcacgtctcaaaaactgagctccctgagtgagcaattcctatccctcttaagggcttacaactctaagggggtttgcatgagagggtcgtgatcgattgagcaagcagggagtaagtgactgaaggctgcatgcaccagtaattagaatggaacagaacaggacagggattttcaaagtgcttttctatacaatgtctgtaatctgtagataacataaccgattaggtcagggctcgatctttaactaccaggcccatggtgtggcgctgggctgtctgcctgtggatttcatttctgccttttagtttttacttcttctttctttggaagcagaaattgggcataagacaatatgaggagtggtctcctcccttagtggcgcatgcctgtaatcccagttacttgagaggctgaggcagaagaatcacttgaacctgggaggcggaggttgcagtgagccgagattgtaccattgcactccagcctgggcaacaagtgcgaaaccccatcacacacgcaaaaaaaggaggacactatggtaggctgcttgggagttaggagctgtatctgacatgaggccaggagaagccttggcaaagctcacatgaccttcaagctcctttcactccaaaacatgagcaaggactgtgccgttgctttccattcctcaggtggggacaagaagtggaaacctatgcagacactagataggttttgttttacaggcaaggtaagaagaactacagaggaagaacctaatgcagacgtttcccaggagactttaactgaagtatcagcaaactgaaaggtaacgagagaatcttgtgcctctgagggtgtctttcccatggatccctgctcagttgcctttcacgggccccctgatttgcgtgaactcctgacctcagatgatccgcctgccttggccctccaaagtgctggaattataggcatgagccaccgtgcctggcctgttccatgcattaaaaaaaaataaaaaaattaaaaaaaatcagtgagaacaagaagaaatgtaaatgctgggcttttcatataaatccagggaattatgggacagttagtacccacctcccagggtattataaggataaattcatgtcatcttcccagctccgtagcgtgcttctgagcacacagagcatgctccataaacattgcattaacgcatgtgtgcatgttgttttccaaatgcagacttactcagacatgagctgccttctccagcctctgtaaagtttaaaggaccagcagagtgtgccatgttttaggatagtgattggtggtttttattttggactgaaagcatttatgttgtgagaagagtataggtttaaggaactgtgtgctgtggcactttgtctagttgagtgctgctataagtgatctagggcaagtagggtcagcattagctgtgaatgaagccaatccatggacccctttcaaacctgcagaattggccaggcatggtggctcatgcctgtaatcccagcactttgggaggccgaggcgggtggatcacttgaggtcaggaggtcgagaccaggctgaccaacatggagaaaccccgtctctactaaaaaatacaaaattagccggatgtggtggcacatgcctgtaataccagctactcgggaggctgaggaaggagaattgcttgaacctgggaggtggagcttgtggtgagctgagattgcgtgccattgcactccagcttgggcaagaagagcgaaactccatctcaaaaaaaaaaaaaaaagaaaaaaagaaaaaaagggaaaaaagaaaacattaaatgcagcaagatgcaggtcagagcatacctccatttgtgtgctcttgtggacaaaatttaaatggcaaataagattttgcatttattgacgtttttctttacattgctgtaagtacaaatacccatttatcctttgacctcctatatctttattctgtatgcatatgaaaaaaaatgctagatctgtatctagattatacatgggtaaacacaacatatagaattatatgactttgcctatgtagatatttatgtatacaatagatattaatcaacattttaaattccccagcctacactgcggatgcagatataaacttactctcacctatatggatccataccatctcagactggaaaacagccatacaaggttatgtttaaacatcaataaagcttcacatataggtgcatggcctgggaagtatgtttttggtaaagccatcttagactctagttccagcttagcatttcagggccctgcttcctttctcactgtatgcctgtgtgattcacatttgccatttgggtcgattgacttatatccatctaagctgatctaagtggtttattaaactcatctgggctgcagaagttgagaaggaaagcaacctctgacctacttattctgaggcttgtctacaggacatatgcaataatgggaattacattgacatacctatgttacccattttctgtttttttttttgagatggagtttcactcttgttggccaggctggagtgcaatggtgcaatatcagctcactgcaacctctgcctcctgggtacaagcgattctcctacctcagcctcccgaatagctgggattacaggcacctgccaccacacctggctaattttttgtatttttactagagatggggtttcaccatgttggccaggctggtctcgaactcctgaccacaggtgatccacccacctcggcctcccaaagtgctgggattacaggcatgagccaccgtgcctggcctttctgtgtatatgtttatctagccaccgatatcatatctatatgtataaaaaagaccaccaaagtgctcagaggtgatttttattttccattcaggccaagtaaatccaatcagccattagctcagtgaagatttgtcaaatccaagccacacaccaaatcacgttatgctaaatgtgaaaatgtcctcattactgggcaccaaggtgttttaaattcagagtctaatcaaaacagctcatggggttctgtccatccagctaggacgcttcagacataccagtgggcctaacctttttcacaaggagctctggcctggccaacaagaatcacctttggtgcttcagtgcagtgtcaccatcacctgtttgaaatgcagccaggtaacatgtaccattttatttgctttcagtatcacagtctatcttctaataagaaacctaggcctctggctgggtgtggtggcttacacctgtaacccagcactttgagaggctgaggtgggtggatcacttgaggtcaggagttcgagaccaccctggccaacatggtgaaactcccatctctactaaaaatattaaaattagctgggcatggtggcatgtgccctctaatcccaggtactagggaggctgaggcaggagaatcacttaaaaccgggaggcggaggttgcagtgagctgagatgatgccactgcactccagcctgggcaacaagagtgaaactccatctcaaaaaaaaaaaaaaaaaggatttttttttttttttttttctgtgctgggtttacttagcatacctttcagattcatgaatgttgcaaataacaagactttatttttaagggctgaatggcatttcattgtgtacatataccacattttctttctccattcacctactgatgaacactcaggttgattccataccttagttattatcagtaatccacttccttccctttcatttgtgtttgttttgttttgtttgagatggagtctcattctgtcacccaagctggagtgcagtggcgcggtcttggctaacagcaacctccgcctcccaggttcaagcaattctcctgcctcagcctctcgagtagctggtattacaggcacgcaccaccacgcccaggtaattttgtatttttagtagacatggggtttctccatgttggtaaggctgatctccaactcccgacctcaggtgatccacctgcctctgcctctcaaagtgctggaattacaggcttaagctaccatgcctggccaaaagcctaggtttctttctatgtaagcctaggtttatttctatgtgaagtgtaaaagaaatttaaactcatagaagcagagagtacaataatgaaaaaaaaaaaaaatctcctatggggttttttgtctgattgagagcttcttcatgatctttcagggattgtattttctttcatcttctgcatcctcctgttttttagccaatggatgaaaaaaaatacagagaagacacatttgcttttatccactgcacttccactcactattagtcattgtggatacagctgagaatagcagttttctggcaggacagccacttctcagtaataaacaactgaaaaagtataaatgtgtcataaaaagctaatagattttaagaaaaacaagcataggcatcaataatgtttgtggtaaataaagattcatattgttgatttctattgagctcccgtaatatttgataaaagcttgcaaatatacagcagaaaaggagtattattctaaatcagaatattgttatggctattttgtcaatagaagtcaatatccaatatacagaatggttattttgtcaatgtaagtaaaaatatgacttcacactaatagtctcaccaatagttgtaatcaaatgctattttttatttaaaattttatttcatataagtaatcccaggcgggcggatcatgaggtcaagagatcgagaccatccttgccaacatggtgacagcccatccctactaaaaatacaaaaattagctaagcatggtggcacatgcctgtagtcccagctattcgggaggctgaggtaggagaaccactcgatcccgggagctgagatcacgccactgcactccagcctggggacagagcaagactccatctcaaaaaaaaaaaaaaaaaaggtctatatgtttgcagacagaccagatgttcaaagaaaactatataataaacatttactaataatttttcaggattcagaaatacatggattctatttctatttctttgtttttttttgaaatagagtcttgctctgttgcccagactggaatgcagtggcgtgatctcagctcactgcaacctccacctccggggttcaagcgattctctcctgcctcagcctccaggtgtgtgccaccatgtctggctaatttttgtgtttttagtagagctgggtgttggggttcaatcaggctggtgggaaaaatatttaaaagagtaacagtcaaaagctgtcctaaaaggcctgagagtttgcatagcttgattgcttggctgaaggcagccagggtctctttgcaggaggccaggaagattagggtgcaagtgaaaaggaatgtaggaagtttatcttactaacctgtttagttatatgggcttaagactaacttttgtcctgctgagggtactttactgccgcctactcgggggtccgcagtttattacccacaaatggtgtttgctttaggcctgggaacctggcctttaattttaccctctagtggtgtttactcacaacttttgttaattagtcttactgaataaatgcaagcctcactatctgatcagagccaagttgcaactgtttacagaactcaccttggagcctgtaagcggctcggaccctcagctggactggcagagcagaatgtgtgtcagtgtactttattcatccacagcgagtgcccccgcgaaaggagcgcttcctcagacggggtttcactatgttggccaggatggtcttgaactcctgacctcagacaatccacctgccttggaaagtgctgggattacaggcctgagccactgcacctggccatattttatttatttttctgtataatttttattatgaccataaaaataaacctgtagtcagtaacaatttaattgtacattttaaaataattaaaaatgtataattacactgtaattcaaaggataaatgctagaggtgatggatactttaccctaatgtaattactacatattgtaggcctgaatcaaaatatgccatataaggcataaagatatacacatactgtatacccacaaatactagtaatagatttcaataagaaaaaaaatttaagctatgggaacaattcaactcatttgcagtttaaagccactggcaaagtgacaagtagagatgttattccactacgtaccaaacagtatattgttaccatcttttaagtacacccttgattaaggtgggataggttaaagttagtggcataatggccaggtgcggtggctcacgcctgtaatcccagcactttgggaggccgaggtgggcggatcacaaggtcaggagattgaccatcccggctaacacagtgaaaccccatctctactaaaaatacaaaaaaattagccgggcatggtggcgggtgcctgtagtcccagctactcaggaagctgaggcaggagaatggtgtgaacctgggaggtggaggttgcagtgagccgagatcgtgccacagcactccagcctgggtgaaagaccgagactccatctcaaaaaaaaagaaaaaaagttagtggcataataatgcttcattaaacgcagaatagtcttaacatggtataaaaaatgaaattaagttcacacatcatctaacaatttttaaatatactgcattcgattacataaaagtacagttagtaaaataatattctcatttaatacttttaactgtaatttttctcactataatgtagaaaactattactctgaacccccactttttaaaaatctttattaataaagtaattcattataatttttgaaaaaaaaagttttaaaatggtctgccaacatgttaatgtaggttaggccatccaaaagacaaagcaaaacatcaacattaagtcataggctaggattatacaaatgagaacccccaccttatacattacttaatataagttaactacaaagagcctctccacttacatttttatcatgcatcttacattttaatgtccttattcttttatagaaaaggtcataatacccaataaaaaagaatctgtaatatccctgatgcagcaacaattgatcacatgctttcacatgtgaccacaataggaataaaataacagcgtaaagaaatttgaaagttgtattacatcattattcactgttcaaaaatttttttcaagaaacaagtacactttcaatgaaattacaatgcttcagaaaatctcccttttaaagttatatacaaaaacagctttagttgtggattcatttttatactcaatactctgatttagtgtaatgtctgaagtgtcagtgccttattctagtgtaaattctcatatttacgtaaaatcaattttgaattaaatatttttttcatatttacatctgcaaaaatatactttagtataaactctctgatgttttctaagctatagattttgaaaaaaaaagtctttccaaattcattatatttgcaggactcttctccaatataaattccatgttgttgaataaagctggagcaactgcttcaggttttcctctagtacacaatgtgtgcaacaagatctgtgatacaagtaaaggtactacaacccccccttatatttgtaatagctgatttcagaataaatattcttctttaaaggcttatattttctgaaagattttttgacagtaattgcacttttattgcttttattaactatgaaccttctgttgagatgtgagtgggcgttaatggcgtttccatattctttatatctgtacgatttttctcaaggataaaagctttcctgtgaaataaggtgtaagcactcaaaagttttgccacattcttcacacttgtaggagttttggcagcattaattctcttacctacaatcaagtgtggcaaccatataaacgctttgtctcatttcatacatttccagggtttcacattagtataatttatttttatgtatacaaaagttggaggtggtggtaaaagcactgttgcatctttcaggtttgtagagttcctcttcagcatgaattatcgccatgtctcttaagaattgagaacttgtggctgggcgtcgtggctcatgcctgtcatctcagcactttaggatgccgaggtgggtggaccatctgaggtcaggagttggagaccagtctggcaaacatgatgaaaccccatctctactaaaaatacaaaaattagctgggcatggtggtgggcaccagtaatcccagctactcgggaggctgaggcaggagaatggcttgataccaggaggcagaagttgcagtgagctgagatcgtgccattgcactccagcctgggtgacaagagtgaaactccatctcaaaaaacaaaaagagttgacaggttgttataggctttgccatattcttcacacttgtagggtttctgtccagtataaattatgtgtaataagggttgagaacttccttaaaaagctttgtcacattctttatatttgtagggtttatgttccatataaattctcatatttagtcagagtccagggctagttaaaggctttcccacattcatcacattcatacggtttctctccagtatgaattatcttatgcttattaagggttgaggaacatttaaaagattttccacattcttcactatgcagggtttctgtctaatatgaattttcttatgtttattaagggctgaggaccagttaaaagctttgccacattcttcacatttgtacggtttctctccagtatgaattatcttatgttcagttagagttgagaatgcagtaaaggctttgccacattcttcacacttgtagggtttctctccagtatgagctctcttatgtttagagaggcttgagtaccaggtaaaggttttgccacattcgtcacatttgtagggtacatctccagtatgaattctcttatgtttagtaaggtttgaggaacggttaaaagctttgccacattcctcacatttgtagggtttctctccagtatgaattatctcatgtttagtaagggttgaggatgaaataaaggctttgccacatttatcacacttgtatggtttctctccagtatgaattttcttatgtgaaaaaagggttgcagggtggttaaaagctttgccacattctctacatctgtagggtttctctccagtatgaattatcttatgtgtagtaaggttacaggactgcttataggctttgccacattcttcacatttgtagggtttctctccagtatgaattttcttatgtgtagtaaggtgtgaggactgcttataggctttaccacattcttcacatttatagcgtttctctccagcatcaattttcttatatgtagtacgggttgaagactggttaaaagttttcccatattctatacatttaaaagatttttttccagtatctcttatcttatgtttgtttgaatttgaaaatttatgcaagaatttcacatattcatcacattgaaatatttttctctgggtagttgccaaacattgtttaagtccattataacctcttttgtgcactggacactcatctacactttcacagcctttttttaactgtaaattgtcatgtctacatttttcatatcttcttagtatcactttttggaaagaatcttttatgctctgctctgaccaaaggtcttgggcaaaatgagaatacataactgaaagaaacaataaaaacacatgacttcaattgctagactcagataaatatacttcacaaatctaacctataaaattatacaaactacgtaagcaagatgacacagcaaaataccacaagctgtaatttcttcctggatatataactgtaacaaaaacatactgaccaaaatacatttgtaaaaaatttataaattagttaagtgtgtaaagggctccaggtgagcacaatgcaaagagccacatagaaaaatagaaaaaaagaaaagtctgttacttatacccaacacagctcttcctgctctccagtataacattgtgcctttaaaagtaaattgcgggcccggtgtggtagctcacacccgtgaccccagcactccgggaggctgaggcaggtggatcatgaggtcaacagttcaagaccagcctggcaaagatggtgaaaccccgtctctacaaaactacaaaacgttagccaggtgtggtaacagatacctgtaatccagttacttgggaggctgagggaggagaattgcttgaactgtggaggcagagattgtagtgagccaagatcatgccattgtactccagcctaggtaacagagtgagactctgtctcacacatgcacacaaatatgtaaattgccaacccctggtttcttttttaaaaaacaagaaaagtattggcacatacatctttatttctggattctaggggcttttttatttttattttttattttatttatttatttattttgaggtagagtctcgctctgtctcccaggctggagtgcagtggcgcaatctcggctcactgcaagctccgcctcccgggttcacgccattctcctgccacagcctcccaactagatgggactacaggtgcccgccaccatgcccggctaattttttgtatttttagtagagatggagtttcaccgtgttagccaggatagtctcaatctcctgacctcgtgatccgcccgcctcggcctaccaaagtgctgggattacaggcatgaaccaccgtgcccggcctctaggggctttttaaaatactggttaatgtctcccacgacatgaaatggtaatatacgttggaatgacactttgagtctaaaggtaaatgtttcagaagcaaagaaactgcagtatcccaaacacggaatgggtgtagcaagtgattactgatttattaagaagaaataagaataagccgatttaactaaacaacacaaaattttagacaagacacatcctaaaaatatgtttgagaaattccaagaatcgctatccaagacgattgattttcagactatgcgaggacagagctatattataaaaatcataacaggtagctttttgttcatgtccaaatctcaaagattacaatgtatacaaaatattagggcaacatggccccatcaaaaaaattataaaattttcaaaagcaacaataaaaagtgtataatttttaaaattccaaataaattgaacaggccaggcttggtggctcattcctgtaatcccaacacactgggaggccaaggtggggaaatcagatgaggtcaggagtttgagaccagcctggccaacatggtgaaaccctgtctctactaaaaatacaaaaaattagctagccgtgttgacaggcacctgtaatcccagctattcagggggctgaggcaggagtattgcttgaatgtgggaggcggaggttgcagtgagctgagattacgccactgcactccagggcgagactccgtctcaggaaaaaaaaaaaaaaaaaaacaaataaaataaatttaattttcacaaagtgaaacaggaacacagacaactactgaagattagaaaaacgaggataacaacgaaaaaatattaaaatagaaaacaaaaattgtgggtgtaaaaaatacaaaaactaagtgaaaaatttcttaaaagaaaaaattgtgtaaatagggcaaagctgaaaagctgaacaaacaaactaggatatacccaaacatctatttataacaaacacatatataaacaaaattccaaaaatcacagataagaagagaattttgggagctgcaagataaaaatgatggtcatttataagcatagtcttatgagataaccaataaattgatcaaaaacatttttgtaggtcaaaaggaaactgtgatattgttattaaagttataataaaaaaagatgtcaagtgggaatagtaccatcaccaaaattgtactaccaaataaaaagaagtccttccaaaataaccaaatcctgagaaagtatattggcactgcatatgccctacatatcaaggatgctgaaaggagtttttttccacagaaaataacataatgcaagaaaacaacacataatcatctgaagatatgtaagtttctggaaaagataggcacattcataaaaatggaatttcttacttaactaatgttaattagttatgttaatcataatggtacagtttaaaagataaaagtatggaaattatgaacatctgttaatgaatagacaacataaaaaatataattagtaaaatcaataacaaatgtgaaggtagatgtaataatgaggaatttctgtatgcaactgaagttaattttttactacattaaaatatattgttggatcttttagaggttttagataatcccccaaggtactactaagaaaatatccgaggccaggcacggtggctcacgcctgtaatcccagcactttgggaggccgaggcgggcggatcacaaggtcaggagatggagaccatcctggctaacacggtgaaaccccgtctctattaaaaatacaaaaaaaaaaaaattagccgggtgtagaggtgggcgccggtagttccagctactcgagaggctgaggcagaagaatggtgtgaacccgggaggcggagcttacagtgagccaagatcgcgccagggcactccagcctgggcgacagagcgagactccgtctcaaaaaaaaaaaaaaaaaaaaaagaaaatatccgtatagatacacaaaagaaaataagaaaaaagctcaaagcatgtcaacacaaaaataaaaaaaacttaaaaaggagaaattaagacacaaagatacaagaatcaaaacaattattttattaacagtaagtttttctctttcagaaaactatttaaatataattatctttccaatcaagagacatacttctaaaaaggctcattaaaaaattttaaaaatcaagactcaacttgcctttttacaagagtcagctgagatctaatgataagaaaagactgaaagtggcaagaccaagtagaaatttcatgtaaatactaacaaaatgagagcagaagaggtcaaaataatattacacaagctacattgttaaagtcaaaagctgtcatattttataaaatgtactttaagttaaaacttcaaaaaagaaggacattaaacaatatatagattaattcatggaaacctatgacaaatttgtttatccatgtgtgtatttgtgcgtgtgtgtgtctcaaattggggtttcaaatatataaagcaaatactaacaaagttgaatagagcaatataattatagtaggatatttcaataccccactttctgtaataataataaaacaagacagtatattagtaagggaacagaggactagaaggcagtaaaaaacaattatttctaatgaaggtatagagaacactcctcaacatcatcaggatacatagccttctcaatagctcataaaacattcctctttatagaccacctgttaggtcaaaaacaaagtcttaacacatttttttaaactaaaatttcatagattactttctatgacaaaaatggaattagagtataagacaataatataaataattgataaattttcaaatatatagaaatgatacaatacactcttgagcatgcacttgttgaaataaacttggctgggtgcggtggctcatgcctgttaccccagcactttgggaggccgaggcgggtgaatttaactccatctcaaaaacaatcaaaaaggaaataattaatattgtgaagatgtctataccgctcaatttaacctatagatttaatgcaatatttttcaaatttctcattgtatttttgaagaaataaaaacagcaaatccaaaactatatggaatctaaaaagacaaagtacccaacagtcttcaaaaaaaaaaaaaaatgttggaggcattacaatttctgatttcaaaacacatcaaaaagctacagaattaaaacaatttggtatgagcataaagatgaaaaagtagactaataaaacagaatgcagcacatgtattatatcacctttcacataattactgcagcattgctaccgaaagccaacaggtaaaagcaatgcaaatttctgtcaccaaatcagtagatataaaaatactggcatatcactcagttttcaaaaagaaaatattctaacaactattaagataaatattgatgacattatgcaaaataaaacgagccagccacaaaaagacagagactgtatgagatatataaagcagttatatgcttagaaaccgaagagtggtgttttaaaagtgctaggaaatgtgaagaattggtagttgtttaatgtgtattgagatttagctttgcaagataaaaatattctagtgatatgttgcataatatgtcaacataattaatataactaaacagaatatatatatatatatatatatttatatatattattttttttcgagatggagtctcactctgtctccgaggccggagtacagtggcaagatatcggctcactgcaatctccgcctcccaggttcaagcaattcccctgcgtcaccctcctgagtagctgggactacaggcatgcgccaccatacctggctaattttttgtattttagtagagacagggtttccccatgttggccaggatagtctccatctcctgacctcatgatccgcctgccttggcctcccgaagtgctgggactacaggtgtgagccactgcgcctggcctagaaatattttattataaattttcttatgtgtttttgacagataacacattttgttatgtgtttcccccacacaaaaataatatagattcataaataaatagatgttgaaattaggagaatttttatgactactcacgtagacaggattaaaaacctgtttcaggctgggagcggtggctcgcacctgtaatcccaacactaggggaggccgaggcaggcggatcacctgaggtcaggagtttgagaccagcctgaccaacatggtaaaaccccgtctctactaaaaatagaaaattagccaggtatggtggcgcatgcctatagtcccagctactcaggagggtgaggcaggagaatcacttgaacccggaaggtggaggttgcagtaagctaagattatgccattgtactccagcctgggcaacaagagcaaaactcccttttaaaaaaaataaaaaaagaaaagaaaacaaaacaaaacaaaaaaaacctggccgggtgccgtggctcacgcccataatcccagccctttgggaggccaaggcgggtggattgcctgaggtcaggagttcaagatcagcctgacaaacaaacatggtgaaaactcacctctactaaaaatacaaaaattagccaggcatggtggtgcacacctgtagttccagctactcagaaagctaaggcagaagaatcgcttgaacccaggaggtggaggttgcagtgagccaaaatcatgccactgcactccaacatgggcaacagaacgagaatccatctcaaaaaaaaaaaaagacgggcatggaggcttgagcctgtttaatcccagcactttgggaggctcaggagggtagatcacctgaggtcaagagtttgagatcagcatggccaacatggtgaaaccccatctcgactaaaaatacacaaattagccggctgtggtggcgggtgcttgtagtcccagctactcgggaggctgtggcagaagaatctcttgtacccaggaggcggaggttgcagtgagccgagatcgcaccactgcaatccagcctgggtgacagagtgagactctgtctcaaaaaaaaaagagaaacctactctgaaaaagcacactaatgtggaacttcaaaacaataataagagaaatgtttactcataaaatctggtatgcaacattgatgtatcatttaaacaaacattgttaggccagccaggcgcagtggctcacatctgtaatctcagcactatgggaggccgaggcgggcagatcacctgaggtcaggagttcaaagaccagcctgaccaacatggtgaaaccccatctctactaaaaacagaaaaattagccgcgcatggtgacacatgcctgtaattgcagctacttgggaggctgaggcatgagaactgcttgaagccaggaggtggaggttgaggtgagccaagatcgcaccactgcactccagtctgggtgacagagagtgactctatctcaaaaaaaaaaaaaaaaaaaattgtctacgtaactgcaatatttagctgttactgtgtactcattaaatgcaggtattttgaatcactggcatgcactgtgtggcagtaaaatttcagagaatatatgcagtgtaattatacacagaagattctgagaaatttttaataaataaccatttaaaagaaactagttactttttatgttttaaatatcttcttacacaaaatgaaattgctataatccaactttagaagaaaagaatagacatattgttaaataaaaaatatatatattttgcagaatagggttagaccctctgatatgtaaaacaagtattaggaaataaactacattattatttagatataggctgaagaaagttgatgaaaattctgtaattcccttttgcctgcagcaaacttgaatttacaagtaactattttagtaaatatggagtacctactaattatccaatttacttcaggcataccatgcaaattctagcacactgtcctaaatttctgaatctaaaattatgacaaatttgaaatagaaaacagaaagtaaaaatgtatagggagagtgacctcactaagatgaaaagattaaaagtcccctattttcatatcctcttacagcaaaaaaaggttagctatccctgacaaaaatgcctttatgagaaaaccaggcattatggctcacacctgtaatgacagcttcatggtacattaaggtaggagaactgcttcaggccaggattttgagaccagtctgcgttatgtagcaagaccccatctccaaaataagtgcctgtaagatttgagatccagggagggagttgtgaaatgctgttaaagcttaagattgagaagtgttctattcagaaggcaggccctcattcaggtgggaaactacaagacccctggttcttggctacagaccaggatagggttcacccaacttggtcccactgagaattctgaacttactctctaactatccgaaactcctcccggccacagtctggcagaggtcctgccattccagagacctggaggaaggtgcccatttacagccacgtaggcaggcctgcagaccttggcctttactgtggtccctggaacagttcaatgactcagtttcatttacctgtgccacagtttatggtcagttctgcctacatagaaacccacccagttacctgaggaaatgctctctggtacacagtgaaagccacactcatccacatcctgatacaacgcccaccatatgcagaaccgtgtgcaaaaacatgtcctaatgtctgccctatggagcaaagtcctgaaggatatgcagtctgtccaaaaataaaatgggaattacaactacccaagtccctgtatcaagccaactaaaggtgaaccctagtgcagacccagcagccttgtgaccaagctacaacccctcttcactacaaattcagagggaatctcatcacactaagggcccaataaaagattttttactttctaaaattagtttatgaaaacttgaagaggtgttttgttttctccatcaaattcagacaccaatacaaaactatattgcgcccattgtcagtgcttctattttaatctaggactggaagtatgtggcagaagaattaatgaaataaatatataaatccattgaaatagaaaaataagtaaaatgctgtttgtagatcatacaatcttatttttaaaaaaaccaaacacagtacttttacatttgctgaggtgtggtttacttccaactatattgtcaattttgtcaattttgtccattcaggacataggcatgggcaaggacttcatgactaaaacaccaaaagcaacaaaagccaaaatagacaaatgggatctaataaaactaaagagcttctgcacagcaaaagaaacaaccatcagaatgaacaggcaacctacagaatgggagaaaatttttgcaatctacccatctgacaaagggctaatatccagaatctacaaagaacttaaacaaatttacaagaaaaaaaacaaccccaccaaaaagtgggcaaaggatatgaacagacatttctcaaaagaagacatttatgcagccaacagacacatgaaaaaatgttcatcatcactggtcatcagagaaatgcaaatcaaaaccacaatgagataccatctcacatcagttagaatggcaatcattaaaaagtcaggaaacaacagatgctagagaggatgtggagaaacaggaacgcttttacactgttggcgggagtgtaaactagttcaaccattgtggaagacagtgtggcgattcttcaaggatctagaactagaaataccatttgatccagtgatcccattactgggtatatacccaaaggattataagtcatgctactataaagacacatgcacacgtatgtttattgcggcactactcacaatagcaaagacttggaaccaacccaaatgtccatcaatgacagactggattaagaaaatgtggcacatattcaccatggaatactatgcagccacaaaaaaggatgagttcatgtcctttgcagggacatggatgaagctggaaaccatcattctgagcaaactatcacaaggacagaaaaccaaacaccccatgttctcactcataggtgggaattgaacaatgagaacacctggacacagggcagggaacatcacacaccggggcctgtcatggggtggggggatgggggagggatagcattaggagagatacctaatgtaaatgacgagttaatgggtgcagcaaaccaacatggcacatgtatacctatgtaacaaacatgcatgatgtgcacatgtaccctagaacttaaaagtgtaattaaaaaaacccatacacagtacattaaaacctgtctaaaccaataaatacactaattaaattaggaaaatataaaattaacataaaagtatatctatggtttcatacagtttaactatctgataaaataaagaaaaaatcttatttactataacattaaataataaatttctgaggaaaaaattaaccaaggaggtaatacaaaaaaaaagaatgaaacaattggagaagatccaagtaaattttaaaatagtttatgtctatggattgaaagattaaatattactgaagtgccatattatccaaagtgatctacagattcaatgaacttcctattaaaattgcagtgtttttttttcacagtaatcaaaaatacaattctaaaatttacatgaaactaaaataaactttgactagccaaagcaatcatgaggaaaaagaacaaagcagaaggatatcatacttaaaatttcaaactatacatttcaagactatatagtaataaaacagaaaaatgaacaaaaaaatggaacagaaactaatactttcacacacacatttaagacctgatgcaaaaagagaacttaaagagttttagtttctcaaaatcatgcagatacttgtgtgtccccaaaacaatggaaaaacagccagattgtgcagtctcttatctgtcatgaagaggactttggctctcagtgtgaacttgaaggaagctcaccgaaagaaaaatagaattcttagagaattgaaaagcataagacagaagatgcctctttgtgagagcaaaattaaaagaaaaaagaaaagaaaagaaaaaaaaagctgcccaggaactatttccttgggaacacagcttcccaaatcacattttaaggactcgctttctctttgaccttgggacctctatctgtgttgtctgtcctattcattttcactcgcacctacctgggggtttggcaatcatctcatgcctcttcatagttaaaggtttttttccttgctccagacaggtgatcaggtttggtttagagacaacaatacctgttttattaagaataaataatatgaatcttgctcatattctccaattacaagctagtactgtgctcagcagagaggatgtgataaagtattctagtaaattaatactaaaatactaagttataacagaaattttttttcttttttgaggcagagtttcactcttgttgcccaggctggagtgcaatggctcgatcttggctcaccacaagctccaactccaggattcaagcggttctcctgtctcagcctcctgagtagctgggattacaggcatgtgccaccacgcccgactaatttttgcgtttttagtacagacagggtttcaccatgttggtcaggctggtctcgaactcctgacctcaggtgatccacccgcccggactcccaaagtgctgggattataggtgtgagccaccaagcctggcctataacagaaatttctaaatatttagaaaatactttcaatttgtaggtttcttaattttactactgggttctactaaatcaaaaattggtggtggcaattagattttcaggtgggggcaacaatattttatgccactaaatttttggaattaccactaatttggagtgaagaacacagctcaactcaggaatgtggaaagtttggattaagatgaaacatcatgaagaaattcttttctaaatgaaaaaattctgaagatttttctggaaaaaggagatctgaaactcttgtatgcaaagaataaattactaaaaaacattctacaaaaaagagaaataaaacctttagagtaatattatgaattatgtactcaagttatcctcaccaaggaagatcaggtttctgtagttctctaacatcacatccctatatagattccgctgtgcagcgtccaggcaatgccactcctccagagagaattctatggccacatctctaaattgcaatggtccctgaaaaaaacacacacacttatttttaccaagtggccatgggtggaatttttaatttgacttcaggtgaaatgagagagtaaagagaagtggttctgacttataggactaaaattatccaataaaatgattttcaacacagaaatattctctaatgtattctctaactctgagaagaaagagcagcacaagatccacaacatcagttcacatatgatatttttctagataataaagtataaaattacggccatgaacacgaacatgtacatttttgagtggtatatttacatcatacggaatgagcagtgaatatttttcagatagaaaagaaatgttgggttagaaggcacctctcaaattttaatatgtacaataagctgacgaccttgttatgcaggtttttttttccagaagatctgaaataaagtctttcttatttatttatttatttatagatggagtttcgctcttgttgcccaggctggagtgcaatggcgccatcttggcttactggaaacaccgcctcctgggtacaagcaattctcctgcctcagcctcccgagtagctgggattagtcatgcgccaccatgcccagctaatttttttttgtatttttagtagagatggggtttctccatgttggtcaggctgctcttgaactcccaacctcaggtgatccgctgcttcagcctcccaaagtgctgggattataggcgtgagccaccgcgcccggtcaattttttgaatttctaacaagctcaccagtaatgccaatgtttttggccccaaaaggatattttttcaaacatttagtaagtggaagagcctgtgttttcccccacattttctagcctataaacaaagagccctcatttatcaaagaaaatatgtaggaaaaaaataagaaaggacagctgccagattaaatgtgatggtttatgcacatcagctgcataaagatacttaataataaaaataactctatagtgaaaaaaatctctcagggagctacttaaccaagtgaatcattaaccactttttttttttttttttttttttttttttttttgagacggagtctcgctaggtcgcccaggccggagtgcagtggcgcgatctcggctcactgcaagctccgcctcccgggttcacaccattctcctgcctcagcctcccgagtagctgggactacaggcacccgccaccaggcccggctaattttttatatttttagtagagacggggtttcaccatgttagccaggatggtctcgatttcctgacctcgtgatccgcccgcctcggcctcccaaagtgctgggattacaggcgtgagccactctgcccagccaatcattaaccattaactgcactaggacaaatttttatgatatgctaatgctcacagaagaacacagcatcactgttgaaatactccccccaaaaaagtaaattatagtctgaatttaaccataaagaaacatcagttttaggccaggcgcagtgactcacgcctgtaatcccagcactttgggaggcacgaggtgggcggatcacgaggtcatgagttcgagaccagcctgactaacagggtgaaacctcatctctacaaaatacaaaaattagccgggcgtggtggcgggcacctgtaatcccagctacttgggaggctaaggcaggagaattgtttgaccccgggaggtgaagtttgcactgagccaagatcgcgctactatacccctggccttggtgacacagcgagactctgtctcaaaaaaaaaaaaaaaaaaaagaaacatgttttatgcaaactttaaaatacagattactcctctgttctgtaatttttagtagtaattttaagtaggcttcacttagctccctagagagcaggtatctcttaataatttttttcagaactttctgggtaataaatgccatctcatttaaataagcattttcttaatctcgttctgcatagagctaatagaacacacagatggagcctcaacattacatgttctccatctttactaaggaccagagttttacccaatagaaatcttgagtatccacatctttccatgttcaacagccacaaaggaaacatttttaatattgcagattataaattattgctgagaatcctgcatagcatataagaagctatgatgcagagaataaagagaaggctctgagatacaggaaagaaatatttttcagagacccttgactatcataagaattttaacaagtagttaaaccaaacttattagggcagaaaaacacaagtagagaagtaaagttttgtaagtactaaacacaaggcagtccaggaagcagagtggacacagctcttcatctgatgcatgtttacctgaaggggaagttattttttttcttcctccttcttctctggaattcattctcagatgagactctctgaataaattacatctgcatcttgagaatatgctttaaaggtgtcagtattacatgtttacctgatagcatgacatcaattggcagaaaaacaaaaggttaacccatttctgtcctttaaaacagaagagattcaggaacaatgagctgctccatgaaaataagaatgtttctcctttcctgtccccaggtgccctcccctgccacagacaccagcaatttctgctacagtaatggaaatatgtgccacactgacctgtccctaccaagtcaaaacagaataggccctgtgaccatcctttagtgcaaaggtggaacttaactctcatgaatgtattttgaagccctcatacctgattctggcctcaccttagagtcatatgaggcacttcattaaacaacatggatgcttccacacacaacaataaacagaagctgtggggagggcacaagagatttctgcaaattggccatgagatcctaatgagaagcctgggctgataaccactaagctaagcattgcctctcaagctttaacgagcttataaatcacttggtaattttggccccactttatgtagtgtgattttgcaggtttgaaaagggtccatgaatgggtgttttaaacaagttccctgtcaatgcggatgttgctcccccttagctcattattagcattagttacagaagcaggaacaacacagggtcccttacactcagcactcttgtcacaaccaaatacttctggtacagataaggacaacccatctccatcctaaagttttatattctttgctggttctttacagacaaaacagaaggcagcaatgtctgagtaagtcttgatttaaaaagcaacatgtacacatttactaatgcaatgtttattaagcaggtactatgtgctcaagagtatgatacagagcactatgctgggtattctcataacatcctgggagctggcactaagggtttaataatttccaggatgtagttaaaggtcccagcatttttatttcttctatttatcggtcatcaaaatttttttaaaaattgtatagaataaaagctaaatatagacagatggaagagatatagaaggaagagtttaatgtattatagagataattttattctattcatatttacttttttgtgacttatggagcaactactggatctgcaggaatagaaaacaagttgctaattagaatgtttctgcaagcattggttttaatacaacatttaaaaactaagaccctaaaatacatactttatttttctcatttatatgcttttgggtttcagaaaattgtgagcaccagctctagaaatgcagtaggatttaccagccaaaactctgatctcttctaatcagttctgtgaggcaagactccatggtagggtcagaactaaatagtctccaaaaagggtgaatctgaataggtctggggcagggtgaagacactatgtagaattctgttctctatgccactggggtacttccagttttgtttttcctaagcttacctaaaagaaatgtaaatccagagtttctgcaattttaatcttttctagccactgccctgtcaactttatactatatactaatatgcaatttaaacaaatcccttaaggtcttctagagtaactttttttgttttgagatgcagtctcactctgtcacctaggctggagtgcactggtgcgatctcggctcactgcaacctctgcctcccagattcaagtgaatcttctgcctcagcctcccaagtagctagaactacaggtgtgcatcaccatgcctggctaattttggtattattagtagagatggcatttcaccatattggccaggctagtctcaaactcctgacctcatgattcgcctgccttgacctctcaagtgctgggaatacaggcatgagccactgtgcctggcctttctagggtaattttattagaaaataaatacgtacacttaaagaaaaagaaatagaaattatactgctgggtgtagtgtctcacgcatgtaatcccagcactttggtaggccgaggtgggtggatcgcgaggtcaggagttcaagaccagcctgaccaagatggtgaaaccccatctctgctaaaaatacaaaaattagccggatgcgatggcaggcacatgtaatcccagctactcaggaggctgaggcagtaggctcacttgaatcagggtggcagaggttgcagtgagctgagattacaccattgcactccctctcaaaaatataaaaaaaaggaaattataataacggttcttctcttcataaatatgccttcagatgtagacatcagaagccacaacaatataaagtggcctaaataaagcccaagattttagacacattgtatttgttgtaccaaccatatgatgcacaattcaattatttatccagctgctagtctagactaaaagtttctggattgtaggaaccatgactgcttcatgtttttttttttttaaatggctatatgaaatggaagctactagtttatctatttgggtctccagatctcctccttgtttatcatccaagtaccaggaaactggagaaactctcatctgggtaccaaccaaagacatctcttgtatgaggggatgaacaaacacagatgactcatttctcttacactgagacagaagcagaattaactcctgtcagcctgacacaattctgcatgggacatctcaaatgcctcaaagacacctaggtgattttgaaggaattcccagtcaccctgggccgctggcccaatgataagccaggctggagagactcaggctgattctaaatagaaaatggaacttccctggtggaactccacaacctggatcacccattctgatttactagctcttgggtaagagaaagaacaaaaatactctactccagtatcacattttacaggtgaatatagttgtggttgtgatcatggctctggatactttgcagccttgatctctcactacagattatgccatcacattctatttcctcctggagcctctgacctcactgtagcaggtcaatgaacaagatgtgaaacatctcaaagagccacactcccaatgcagaaaatgccttttgttagttttctgtacattctctatccaaagtctggcccttttttatctgcagattctaggtaggatcaacttggctctgtatcctttggtgttacagtaagtggagtacaattaaaggagaaatcttaagaaaaagctcagattagatatgagattgatcaagtcagccagaaaatattcccctaaaagcaatttctctctcaacacccaaagtacacagctactctcagcatgagaaacatgaacattatggagaaagggggcagattttcagaatacttttataaagtttcttttccatctctgctgctctctcatctcctagccattgaataggggttctatatttaaatacatctgacaacttccaacaacactttttgatgaagaaatagaatctgactgtgttcatatagtggaatacattagagcttgcaatataactaactaaagagctatgttggtggtgtttgggtggccacatcacctgtctttatttgtcctgtaatagcagcattccaatttagtgaaataaaagatactaaaattgtgtttactcataattatccctattgaataaagtaataaacatgtcagactaatatctactataacaatttggtagtaaattttctttggatattagatataaatatctaagcattaataattttaatgaactagtcataatgtatgtagcatttttaaaaattgcaactatatttcaattaaaacttttacactttcaaaagtgtaaataatattaaaataaccatttaagtgaaaaggaatgcttatactctgctggtaggagtgtaaattagttcaacaactataaaaagcagtgtggtgattcctcagagaactaaaaacaattatcatttgacccaggaacctcataattgggtatatacccaaagaaatataaattatattataaagacacatccacatgcatgttcattgcagcactattcacaatagcaaagacacgcacaggctgtaaatgcctatcaatggtagactggataaagaaaatatggtatggtcagatgcagtggctcatgcctgtaatcccagcactttgggaggacaaggcatgtagactgcctgagcttagaagtttgagaccagcctggcaacatggcaaaatcttgtctccacagaaaatacaaagagaaaaactggccaggtgtggtaacgcccgcatgtagtcccagctacttgggaggatgagataggagagatttgcttgagcctgggaagttgaggctaaagtaatccaatatcatgccatggcactttagtctgggcaataagtgagaccctgtctccaaaaataaaataaaataaaataaaagatttagtaaaaacaaaatatggtacatcatggagtactctgtggccactaaaaaaaaagatcatgtcctttgcaataacactgatgaagctggagaccattattcttagaaaacaaatgcagaggctgcgtgtgattgcttatacctgtaatcccagcactgtgggaggccaaggggggtggatcacatgaggtgcggagtttgagaccagcctgaccaacatggagaaaccccgtatctactaaagatacaaaattatccggggttggtggcacgtgcctgtaattccagctactcgggagactgaggcaggagaattgcttgaacccaggaggtggaggttgcagtgagccgagatcacaccattgcacaccaccctgggcagcaagtgcaaaactccatctcaaaataataataataataataataataatgcagaaacagaaaaccaaatgcatgttattatttataagtaagagctaaataataacaacacatgaacacaaagaggagaacaaaagacactgaggcctagttgagggtggaggatggaaggactaagaggttcagaaaacatacctgtttggtgctatgggtagtatctcagtgacaaagtaatctgcacaccaaacctccatgacataattttagctgtgtaacaaacctacatgtgtaccctgaaccaaaaataaaggtaaaagaaaaaaaaaaatccctgggtgggagagagtgcaatgtaggtgagaggactgatttttggtacagatagtggtcccagtggggctgtactctatttatttccgtgtgcatgcaggcaggtgagattatgaacagctggtccaaaatgctaggatggtggagaaaacaggttgctgctgcagattcagtgtctgtgagtgggaatatgctaggagacttgtagagacttgtggattcttggcaagaaacactaggatcaaaaatgccattgtgggccgggcgctgtggctcatgcctgtaatcccagcactttggaaggctgaggcaggaggatcacgaggtcaggagatcgagaccatcctggctaacatggtgaaaccccatctctactaaaaatacaaaaaaaaattagccaggcgtggtggcgggcacctgtagtcccagctactcaggaggctgagacaggagaatggcgtgaacccgggaggcggagcctgcagtgagccgagatcgcgccactgcactccagcctgggcaacacagcgagactccatctcaaaaacaaaacaaaacaaaaacaaaaacaaaaaataccattgtgaggttcctgagggtggtgccgagtcccgggaggagtgtggacatgtcaatgtctagtgtgtgtgttcgtgagtgggtgggaatcctgtggtggcagctgtgggaaaagggggtctgtcatcagagcttctttcctctacattttcagtcctctgtcaccctgagagaagacctgggatcacaggacaacgggcagtgtgacagcctgtgtacgacagagcagagcctcccattcccaatcacccaaagttttattccaggccaggcctccgtggtatcttttttctggcaccatatctgtagagtctgctgaacatcaaacaattctccaacactaacttattgtctcacatttgaattctgacagcacccagagtcatcgtagaccctgattcagggctcagtcccgcaacattgtcctcatggcagatgccagtcacaaaccccaagggcccatctatgcttctgagctactgtttaaaacctggggagtcccataacctctctgaagttcaataatttggtagagctactcacagaatcatcaaaatactgtagttatctttactggtttaatatataagatgcagccctggaaaagccaaatggaagaaatgcacagaacaaagaaaagagatggggaaagatgaaacacatagataatcctggaaaatttttctgattaataaaattctccatcctttgtgtgctccaggaacagtttatggaaagaaacacccttcccattatgagttagatggtgctctcttttcttacctatcacacagccagacacacactctgcacattttctctttctcattaaaaaaaaatcagctgaatttgttttcagtggtcataatgaaatatttcttttcttttcttttctttttttttttgagccagagtctcactctgtcgcccaggctggagtgcagtggcactatcctggctcactgcaaccgctgcctcccaggttcaagccattctcctccctcagcttcccgagtcgctgggattacaggtgcccaccaccacacccagctaatttttgttttttcggtggtgtttttgagatggagtcttgctctgctgcccaggctgaagtgcagtggtgcgatctcagctcactgcaagctccatctcccgggttcacaccattctcctgcctcagcctccccagtagctgggactacaggcacctgccaccacgcctggctaatttttttgtatttgtagtagagacagggtttcaccctgttagccaggatggtctcgatctcctgacctcgtgattcacccgccttggcctcccaaagtgctgggattacaggcttgagccactgcgcctgacttgtgttttttaaaatagagacagggtttctccatgttgctcaggctggtcgcgtactcccaacctcaggtgatctgctcaactcggcctccacaggctgagtgctgggattacaggcgtgagccaccagcctggcctaaaataaaatatttcctttttttttttttttttttttttttttgaggggagttttgctcttgttgcccaggctggagtgcaacggcgccgtcttggctcactgcaacctccacctcccagtgggattacaggcatgtaagcctgcaacaggcagcaccacgcctgcctaattttttttgtatttttagtagagacagggtttcttcatattggtcaggctggtctgaaacccctgacctcaggtgatccacctgcctcggcttcccaacttgctgggattacatgtgtgagccaccacgcccagccaaataaaatatttcttaatcaaacttaagtttatctccctcccttgggctcctgaactttgagctaccctcagtctgagtcaacatacaaccccattttatgtccctcctaagaacatgctgatttcagtgtaaaacattctctgatctaagatctgactttttcaccctccatttgccattcccctcccacctcctttctaatcttgtttgcacctccctaggaaagaaagtgtttttctgcctacacctttgcaagccataaagatcttatagttagttggtatttcctctcgttgcaatacttttttagaattttttttacgtaaatctgattttttttttttttacaaagtctagaaagtacctcaaaacaataacaacttcatcatcagtaagactctctcagtttcctttcatcttaacctcaactgcatctgcctgtggatccccagctttccagggctctgtggcttctctcagaataaaggcttcttctatggctggggtgagcaggctgagacagctgcaggggtggctcctcagaaagaactaactgggcctttaataacttcctctcgcatgcttaacattagccttagcttggagtcactaggttcaagctttaatttccatgtcagagttattcacttggtttttgaaactgtttcaatagtcctgtgaaattactcaaacacagtgtttacgtaagggaaggaaattttaaggtgctttttttttttttttttgagacggtcttgctctgtcaccaggctgcaatgcaatggcccgatctcaggtcactgcaacctctgcctcccgggttcaagccactctcctgcctcagcctcccaagtagctgggactacaggcatgtgccaccacacctggctaatttttgtatttttagcagagacagggtttcaccatgttgagcaggctggtcttgaactcctgacctcaagtgatcaacccccctcggcctcccaaagtgctgggattacaggcatgagccaccacacctggctaaggtgcttgcattttataccttcataagaaaagcaaatatatctacttctttcagacaacgtattattttattatttatattaaaaacaatgtagtaaaaaattagtcatatgggaacacttctagaaggtaccacatttcatcacatataatttagcattaaactcagaaatcaagacaacaggaaatagaaccaagatattcactgtcacaaatttaccctgcaaaaagaggaactgatgttttgacgatctatataactcatcaattatctaccagattttcctgtggaaacattttcattgtctacagacaaaatggaagagagattttctctacttttttccttggtagctagcattcttaaagctaaggcttagaattctgtttgaaatcactcagccataaaaaacacatctgagaaaattcctgaactcactctgggaaagaaaaaggtaaatgagaattattaacaaatagaatgattagaaactaattttttaaaactcatctcttttatgtgctttgtaaatatttttttacctttcaagccctactaataaaatgcaaattacagttaaaacactgatgcagctgagtgcagtggctcatgtctgtaatcccagcacttcgggaggccaaagcaggtggatcgcttaagaacagaagtttgaagccagcctggtccatctctactaaaaacacaaaaactagccgggcgcagtggcgggcacctatagtcctagctattggggaggccgaggcatgagaatcacttgaacccaggagccaggggttgcagtgagctgagatcgagccactgcattccagcctgtgcaacagagactgtttcaaaacaaaacaaaaacaacaacagcacaaacacctgaggttaaaataagtgaacaaatcttttcaaggtacagatcctatcacccaccccatcctgttcaggtacatgctcaataactaccctcccaggagacaccgcgccatgccccagtgagtgccccacgtgcattttactttgttaagtttttacgccctctcactggggtcagttttttttgtcttttgaagtgttttttcactacttttctgctccccacccaagagaatccaggggtcagaaattatttgttttcccctcaataccagcatctgattgtctgaccagcaatgtgtctccaagaaatggaagctaggttgggtgaagaaaatcttcatgtctcaaggggttagcttttcaaaaaaaaaaaagaaaaaagtgcaccaggatctgcctttcaaccccaaggctgccacctgctcccttaagaggctacactccatacttcaggtagtcctatgggagaaaatgacccaagagctaacagtcactagacactctagcagacatagccatggtgggtatcttggtttatccccagaaagtactaaaacccaggaccagaaaaaaactgaaggttggctgaggacacatcaccctattaagtttccagagggtaatcttgacccaaaaacattcggtaagttctctggaaaaataaaagacaaagaggcacagatattttttacaatacagtgtcaggggattattctttgctttcttctcatgggaaatatttacaaacagaaaacaaatcttttcaatagtgttatgcaatactttttaaaaaatgactattggtcaggcgcagtggctcacgcctgtaatcccagcactttggaaggctgagacgggcggatcacgaggtcaagagatagagaccaccctggcaaacaaggtgaaaccctgtctctactaaaaatacaaaaattagctgggcgtggtggcacgcgcctgtactcccagctactcaggaggctgaggcaggagaatcgcttgaatccaagaggcggacgttgcagtgaggtgagatcgccccactgcactccagcatggcgacagagtgagactccatctcaaaaaaaaaaaaaagattgaggaacatggggtacacctgaggccctgcttgggacacatgtgaaaaacgccagggaaaatcagtcccctgtgggatgtgaaaataattaagtggcaggcaattagaatgaggaagctctagtccccagattcccacttctaaggaaaaaaaacaaaactcaagtgtattctttggtaaattactacattaggggaaacaaaattcaggcttaagcaactataaactgccaattaaactctgattacataaccaggaaatttccatctcgattgtacaaatttaaaaactacctaactaggctgggcgcggtggctcacgcctgtaatcccagcaatttgggaggctgaggcgggtggatcacaaggtcaggagatcgagaccatcctggctaacacggtgaaacccatctctactaaaaatacaaaaaattaggcgggcgtagtggcgggcgcctgtagtcccagctactggggaggctgaggcaggagaatggcgtgaacccaggaggcggagcttgcggtgagcggagatcgcgagactgcacgccaacctggcgacagagcgagactcaaataaataaataaataaataaaataaaataacaactacgtaactatacctaatcaattattgaatttggttttcttcatcatgcatttcataaatgtcttttcttcaagcccctcccatggactacaaacaacaaactgtagctgggtgctctacaattcttgaatcacactttcattaaattatttgatatttttgcggtgactcccccctccccgtttgtgtttttttaaggcagagtcttgctctgtcgcccaggctggagttcagtggcgcgatctcagctcacggcaacctccgcctactgggttcaacagattctcccacctctgcctccccagtagctgggactacagacatttgccatcacacacagctaacttttgtatttttagtagacatggggtttccccattttggccaggcttgtcttgaactcctgacctcaactgatcagcccgcctcgcctcccaacgtgctgggattacaggggtgacccaccacgcccggcccaataaatttttaataggagaaaagagaaactgtgaaccccacgaaccaaagctcttcccattcatgaacccgcaccccgagtcaggattctcccctgacgaccttcccgtggcccctgaacaatctgggaaagacctgtgggtgcagagctgcccggagagggttccacgccagggcacagtcactgcgcagggaaaagacaggacaccccggggacccgctgtcaacgcagccgccatgttatggctggggcggagctgggcaatgagaacttggagcgcagattgtggagctgactgccgggaggcctgagttctgccactgccacagccacagccacttcctccccagttccaaccagcccctctccctctctcgggatgtcgaactggcactctcaccatttctaggcttccagggggtcccggcgtcctagctgtgaccctcctaatacctgcaggtcacagggccacagaggctgggcctctaggagctgacggcacagagcagtgaagacgatagctggatctctggcgtcagcgagagacaatgggcccgccaaagccggaagccggaaaccgtcctgttcgctacagctgcgtggctgattggacggtttccagcccagcgtccctgattggataatgcttgaggccccgccccctcaggtcctgagttacagaagacgtgatccgatgctggactgagtgaagaaagagagacagtctaagctgcagccttttctttttttaaaaaaattttatttatttatttttttgagacggagtttcactcttgttgcccaggctggattgcaatggcgtcatcttgactcagtgcaacctctgcctcctgggttcgagcgattctcctgcctcagcctcccgggtatctgagattacaggcgcctgctaccatgcccggctaatttttttttgtagttttaatagagacggggtttcaccatattggccagcctggtctcaaactcctgtcctcaagttatccgcctgcctcggcctcccgaagtgctgggattacaagcttgagccaccaagcctggccagctgcagccttttcaaacaggacttcctccctgagctgagccaggcccaccccagagcatgggaaaattctctctctttttgactctctctctttttgaatatattcaaaaggtgaacggaagtattctgctgtcatattaataatacgtaaaatttttgttcaagagaaaatcaacttttactttggtaatagtgtattatcaattaaagctaattttaataaaaccttagaaataaatttgtcattttgaacactccagatttacatatatattttgtaatctcttgtaagttttttaactttttatattttatttttatccacattctttttatttttccatttgaaacaacctttaagtaatttcaaactgctatagggggtagaaagaaatcatttagggccaggcgcggtgggtcaagcctgtaatcccagcactttgggaggccaaggtgggcagatcacttgaggtcaggagttcaagactagcctggccaacatggtgaaaccccatctctactaaaaatacaaaaaattagcagggtgtgctggtgcacacatatagtccccgctactctggaggctgaggcaggagaatcacttgaacccaggaagtggaggttgtgtaacggcccaaggggttcaccttgccctttgcctagacagagccaattcatcaagacaggggaatttgtggaggaaaacttaaatattaaatttgaacttattgaacgtggacacaaacaatggtcaccaagtcttggaacaggttatgtgaaccccttgaggtgttcatcctgcgctgttttggagaaatctctatttcaatctattccaatacattggttattgaaaaacaatagacaatcacacacacacaaaaaaagttgacctttttgtgttctttgagcccaatcgcgaagggccctcatgactgggcctcatgccaaagaactcattacaaaaagagctagggtcccagatcacgcggaaccttcatgagacctctccttgtctgtgcagagatgggtggctgactctggagcccaggctgttgctttccagtctggtggtgaatcctcctagtctgatgagtgcggtatccgactctggagcccagcctgttgcttcctggtctggtggtgaatcctccatagtctggtgtggaggaaaagttaaatattaaatttgaactcaattgaacatggctacaaacaatggtcaccaagtcctggaacaagttgtgtgagctgcttgaggcattcatccagcgctgtattggagaaatctctatttcaatctattcctatacattagttgttgaaaaacaatagacaatcgcaaaagccagttgacttttgtgttccttgggtccagtcacgaatggccctcatgaatgggccttatgccaaataattcgttacaaaagagctagggtcccagaccgtgccaaagctccatgagagacctctcctcctctgtgcatgggcgagtgtccaactctggagcccaggctgttgcttcccactctggtggtaaatcctccatagtctggtgagtgtaaatatatatatgtctcttttctcctctccttttcctattgcaatttgcttattatatgaatcttcttcttatatcaatctgcttattgtatttatttgcttattatatcatttgcttattatatctgcattgccatttacgtgggataaagcttgtttacccttaaaggtattgtgtgtgtgtcttttcttctcaccttgagcctttccctcacagaacatttttggcattacaaacaggatttgaaaccaaaagtgtgcctctttttggccacaaggacagggctggaggctcggggacttcccataccctgggatgggaactcccccagttctcccccttggtgattgaatggtccaggggaactggactttgtgagaattgagaatctaaattagtgcaatttaaacctttgtgcatgaagtgctgcaggagattccagtcagcaaaaaagatgctgagggatctcccagagtggatggtgtttccttactgcttataagtttatgtgtcaagatacgggctggttgcaagaagagaaatgtaagttggaaaacgaatatgctaatctgacttccagactggccctggcccaatgccaggcctatgtcttgattgatcaggctcaaagctatcagcctattgctgaaaaaagcagctgtccaagtggcccggtcagggtgaaactgaagaactagtcagttggggcttggaacaggtaaaaacccagctcctatctcagaaatgggaaattaacctagtaaaattcaaggacccgcacaaactgtaaaattccatggcgttctatggaatgcagagatgtagtccatcttaccaaagactaaggctaaaatactagaatttacaacccctaccactaaaaaggaggcccagaaatttattggctttgtttggattctggagacatcatattccccacttgggtaacattttacaacctctgcatgcagactttcactggggagagacagagagcatggcttcttaacaagctaaacaagcagtgcaactggccctggatctatggcccatacgggatgggccagcagaactccaagtgactgtcctagatcaacatgctaattgaagcggtaggcagaaacaagatgggaagagggtacctttcaggttttggacccagaaactgccagaggccagaaaagcttatacccctttcaagaagcaattgttagcttgctattgggctttgctggaaacggaacacctctgtttcaaccatgaggtctttatgaggcctgaaatttctattatgacttgggtcatgagttccctcaaagctcaccagatagagcactctcaagaaagtagcatcataaaatggaaatagtacatacaagtccatttaagccaaaaccaaacggggtatcacttttacatgaggacgtacaaaacttcccagctcaggaaatcaccaagcaagccttgctgttagggaaggaaacctcccctgcccaatggggcaaatcctttaaagaactaagcccagaggatcagaaatatgcttggtttactgatggatccaccaaatacattggtgggacccgatgcttgaaggccgtggcttataatcctgttaaaaacataagtatttatgatgaaggaaggggtgggagcagccagttagctgaactagtagccatcctctgagctattcaagaggaggccagagggatttgtcacttgtataccaactcttggtctgtagcaaatgatcttactacctggataccccaatggtaacaaaacaaatggttaattgggaataaagaggtttggggaaaacaatactggggagatatctgaatcctttcgcacactaccattatcaccgttttccacgttgatgcccgtgcatctctgctttctcttgacagactatttaatcagcaagttatcaataacgccaaaatttccaccataactgcaaacttgaatggattacgtgtccaagcctttcaatgacaggcattgtaatgtatggtggtataattgatagtgattattggcctaaatgctactaatttagtggcctaaatgctccacttaaaagacacaaaatggcagaatggataagagtttaccaggctgggtgcagtggctcctgcctgtaatcccagcagtttgggaggctgaggtgggtgaatcacctgaggtcgggagtttgagaccagcctgaccaacatggagaaaccctgtctctactaaaaatacaaaatttagccagacgtggtcgtgcatgcctgtaatcccagctactcaggaggctgaggtagcagaatagcttgaacccaggaggcagaggttgcggtgagccgagatcatgccattgaactccagcctggacaatgagaattaaactccaactcaaaaaagaaaaaaaaaaaagattttacaggccaaatatctgctatcttcaagagactcacccaacacataaggactcacttaaacttaagggaaagggttggaaaaagatattccatgcaaatgtaccccaaaagctagcagtagtagccattcttacatcagacaaaacagatattaaagcaaaaacagttaaaaaaaaaaaagaaaagacaaagagggacattatataatgataaaaggactagtccaacaggaaaacatcacacctctaaatatatatgcaccttacactggagctcccaaatttataaaacaattactactagacctaagaaatgaaatagatgacaacacaataataatgagggacttcaatactctactgacagcagtagacaagtcatcaagacggaaagtcaacaacaacaacaaacaatggacttaaactatatcctagaacaaatggacttaaaatatatttacaaacattctatccaagaactgcagaatatacattttattcatcagcacttgaaacattttccaagatagacatatgataggccacaagtctcaataaatttaagacaatcaaaattatatcaactactctctcagactgcagtggaataaaagtgaaaatcaactccaaatgaaccatcaaaaccatgcaaatacacggaaattaaatttaaaaattaaagatcaacctgtttctgaatgagtgttggatgaaatcaagatggaaatttaaaaattctttgaactgaatgcactcgccatgtccatggagagaggctgaggcggccgagctccggctggaggtaccggagcgccaggacagcaaagatgtcggctgccttagtccgggcaaatgtctgggctgtgagcaagaggaaacttcagcccacctgggccgccctcaccctgacaccttcagcagtaaacaagataaaacaacttcttaaagataagcctgagcatgtaggtgtaaaagttggtgtgcgagccaggaggctgtaatggcctttcttatattctagaatatacaaagacaaaaggagattctggtgaagttattcaagatggagtcagagtattcattgaaaagaaagcaaagctaacacttttaggaacagagatggactatgttgaagaaaaattatccagtgagtttgtgttcaataacccaaacatcaaaggaacttgtggctgtggagaaagctttaatatttgaaatctcaggactcttctggccgtaggttccaggaaagctggtggaagccttggggctcactgcagaaatcatgtgactgtcacgtgtttaatatgctgctgccttgtaaggaaaataaagtgatgcattttgaaaatgaagccagtgtgttagattccagaagaaatgatatttgtattccctgtaggggacagaaaatgagaagccatcactctctttggatcatttaggtctcttacatcctttgttttagaaacagtttcattaaagttgccttcctgggcacctgtttatccatttcctggaccgtgtgcactccttagctctctactgaatggcttgaacatgcatccccctcagcatttctcccaaccagatcggcaactcctaaaatctgagataggacgtcctgactgctggtagtaacatggtggtgcattgttttttccaaccaaacttaacatagccttttagtacatttgtatgaaaatttttattttcagatgcctcattgcgtaccctttaatagtaccgggcaaagattttcttcaactatagtacagattagttctgagtgatggtatcaaaaggtgagaaagatgtcatccacctgttttttaatccatttcttttgccaccctatatgtctgctcagagatgggatctcaaggtgactttgattcttttagttgtggggtctcttaaagccatctagcccacctccctcaattccctatgtgaggaagcaaatccccagggaagccaaagtgctcctgtccacccccactccacaggccaagggagaatggggactctacccccatctccccttccttgtaggtgacacatgctctgccctctgaggcaatcagtgaaggcaaatggtctgatttctttatttggttgacattttgatagaatttctttataatttgatggagatcatagtattttattttgagtgggaagaattttaaaaccattttatgtgaattaccatcttgtttctttcacctttgaaacaatggtttgtagcagagaagacattgtagcaacccagaattatgcttttggaatgtggtcctcattgtgcaggagaacatggggatcttttcttaaaattctgtgtgcatacactttctgattcctcggtccagttgctaaagtttttaatattttagcctaatatttttatcatcaacctttctttaaaagtgttccttttgtcacgtagttactgattttcccgggtttgacatgttaagtattctatgaaatgacatatatgctttttttgaaagctgattctcatgaattcaagtagctgaggtcctttatgtttctttcattccctaaagtagctggcacaaaacacaccaaaacctagagcagtagttttatgtaaatgctcatgagtttgtatcaataatataattgttgatccacttataattcattcaatactgtatgtatctagagattgagttgtcaattaaaaaaaaaatgaggcctcaggctgggtgtggtggctcatgcctgtaattccagcacttagggaggccgaggtgggtggatcacctgaggtcagaagttcgagaccagcctggccaacatggtgaaaccctgtctactaaaaataaaaaaaaattagctgggcatgatagcaggtacctgtaatcccagctacttgggaggctgaggtaggagaattgcttgaacctgggaggtggaggttgcagtgagccgagatcttgccattgcactccagcctgggaaacaatgtgagactctatcaaaagaaaaaaaatgtggcctctttgtgatcataaaaaaaaaattatttgaaccgaacaataataatgacacaagctatcaaaatatctggtatatggcaaaagcggtgctaaaaggaatgttcatagcattaaatgcctacatcaaaaagtctgaaagagcttaagtagacaatgtaagataacacctcaaggaactagagaaacaagaacaagccaaacccaaacccagtagaagaaaagaaataacaaagatgagagcagaactaaatgaaactgaaacaacaacaacaataaaacagaagataaatgaaatgaaaagctggctcttagaaaagataaacaaaattgatagaccattaacagcattaaccaagaagagagaagatccaaacaagctcagttagacctgaaatggaagatattgcaactgatgccacagaaatacaaaagatcattgagggctactgtgaacacctttacatgcacaaattagaaaacctacagaagatgactaaattcctggaaatgtacaaccctcctagattaaaaaacaaaaacaactctgaacagactaataacaagcagtgagattgaaataataattaaaaaaaattgccaaccaaaaaagaagttcagaaccaggtggattcacagctgaattctatcagacattcagagaaaaactgatggggatggggccaagatggctgactagaagcagcatcccttagaaaagaatcataatagcatgtgaaacctgcaccgtcacctgaggtatccaggttctgtcatcagaactgactaggtggctggcatgaaccatggagaagaaggaagagcagtgtggggcaacagcccacctgacacccacatgggcctggggagcccccaccccccagccaagggaggcagtgagtgagcatcctacccagcctgggaaactgtgctttttccatggaacagtgcaacccatggatcagaagattccactcgtgaacccacgccaccggagcctaaggtaccaactgttggaaacaagagctcagagtcacaaagaaaacaagcactcaaacaaggaatttctcagcaaggcaaatttacttctacagaagggtgctgctcacatctctggttgttgtgagagcacactgtactagagagggaaggggttattattgctaacatagtccctacttctgtgtcctgtccccattggctggagtcagaccacataatataagctaactcgattggttattttaaatcgagactggcaggaaggttgtttacagagcaggtaactaggagtgaggaggacttcttccaaataaagaagagatgtgggttacagattgggactggtgggaagggttgtttacagagcaggtagcttggagcaggaacatacaaggaagttgatttggagaacaaagaacaaggaagttatcctttgaagagaaacttattatgcctgacacaaccctggagctaagcagatcctcaacagcctctcagctagaatctgcgtaagcctgccaagttcccaggggaggggcgaccagtaccacagctgtgtctggctgctgtctaagccctttgagctccttgggggagggacagcagccagcaatgggactcacaactgcctgacaggctaagctccctgggctcaggaagggcagcagccatctctatagctcctggccacacttttcccctgctagagccagggaggctggacagcttggtctcaagagatgtcccctacaacccaacactctggctgttgcagactgcagccagagtgtctcttcaggcctgaccctgaccatccctcctcactgggcagggcctcccagcaggaactccaacagctccagccaggggctcagaggcagaactctgatctccctgggcctgagcccctagggggaggggtgactgcagtctctgtggaccagcagacttagcctttcctcctgctagttctgaggaattcaggcagcccagatgagtgggcttcccctcaggaatcaccccacccctccaccgaaggatagtcaaagtgcttcattaaatgggttaggctccctgtgccacccaaatgggtgagacccttcaacaggggttgtcagacaccctatacaggagcgatcctatgggcatcaggttggtgcctcttgaggtcaaagattccagaggaaagagtaggcacctgtctttgctgttctccaacctccttgagtgacatctccaggcacgggagtaaaccagatgaatagggccggaagtgatcccccagcaaactgcagcagccctacagaagagggacctgaccattgaaagaaaaacaagcaaacggaaagcaacaacaacagcatcaacaacaaaaaagtacccacaaaaaccgtatccgaggccgggcatggtggctttcacctgtgaccccaagactttgggaggctgaggtgggcagatcgcttgaggccagagttcaagactagcctggccaacatggcgaaaccctgtctctactaaaaaatgcaaaaattagccaggcgtggtggtgcatgactgtagtgccagctacttgggagtctgagacatgagaatcacctgaacctgggaggtggaggttgcagtgagccgagatcatgccactgcactccagcctgggtaatagagcaagactctgtctaaaaaataaaaataaaaataaaataaaaataaaaataaaaaaccatccaaggatcagcagcctcaaagatcaaaactagacaaactcatgaagatgagaaagaatcaacaaaaaaatgctgaaaggccagagtgccttttctcctccaaatgatcaaaatgtctcttcagcaacgtgcagaactggacagaggatgagatggatgaattaacagaagtaggcagataataacaaagtctgctgagctaaaagaacatgttctaacccaattcaaagaagctaagaaccttgataaaaggttagaggaaatgctaactagaataaccagtttggagaagaacataaatgacctgatggagctgaaaaacacagcatgagaacttcatgaagcatacaaaagtatcaatagccgaatagaccaagcagaagaaaggatatcagagtttgaagaccaccttgccgaaataaggcttgcagagaagattaaagaaaaaagaataaaaaggaacaaacaaagcctctgagaaatatggtgttctgtgtggaaaatgcacagggggagaagaaaagacacacacacagtacctttaagggtaaacaagctttatcccatgtaaatggcaatgcagatacaataagcgaattgatatcataagcaaattgcagtgggaaggggagaagggaaaagagatgtgtatatatatatatatttacactcacgagactatggaggattcatcaccagatcaggaagcaacagcctgggctccagggtcagacaccagactcaccagactatggaggattcaccaacacactgggaagcaacagcctgggctctagagttggccacccattcatgcacagacaagcagaggtctcttgaagctttggtgcagtctgggaccctagctctttttgtaacaagttgtttggcatgaggcccagtcacgagggcccttcgtgactgggctcaaggaacacaaaaaggtcaacttgtttttgcgattgtctattatttttcaataactaacatatagaatagatggcaatagagatttttctgaaacagtgctggatgaacgcctcgaggggctcacacaacctgttctgggacttgatgaccattgtttgtgtccacgttcaacggagttcaaatttaatatttaactattccaccgcattcacaactccttctgtatattgtaaatatagcactcaaaaatgtgcatgttcgtattcatgactttaaatttctactttattatctagaaaaatatcataaataaactgatgtagtggatctcatgctgctctttcttctcggagttagagaatacattagagaatatttctatgttgaaaattattttattggataattttagtcagtcctataagccagaaccaattgtctttactctctaatttcaccttaagtcaaattaaaagtctcgcccatggccacttggtaaaaacgtgtgtgtgtgtgtgttttccagggaccattgcaatttagagacgtggccatagaattctctctggaggagtggcattgcctggacactgcacagtggaatttatatagggatgtgatgttagagaactacagacacctggtcttccttggtgaggataacttgaatgtataattcataatgtaccctaaaggttttatttctcctttttgtgaaatgttttttagtaatttattttttgcgtaaaagagtttcagatgccctttttccagaaaatttttagaatttgttcatttagaaaagaatttcaagatgtttaatcttttttttttttgagacagagtctcgctttgtcacccaggctggagtgtagtggcacgatctcagctcactgcaacctccgcctcccgggttcacgctattctcctgcctcagcctcccgagtagctgggactgttggcgtacgccgccacgcctggctaatttttttttttttttgtatttttagtagagatgaggtttcaccgtgttgtccaggatggtctcgatctcctgacctcgtgatctgcccgcctcagcctctcaaagtgctgggattacatgcgtgagccactgcgctcagccaagatgtttaatcttaatccaaaatctccacatgcctgagttgagctgtgttcttcactctaaattagcggtaagcccagaaatttagtggcataaaatattgttgtccgcacctgaaaatctaattgccaccatcaatttttgattcagtcacaccaggtagtaaaatttaaaaatctacaagcaaaaccgggtgcggtggctcaagcctgtaatcccagcactttgggaggccgaggcggacggatcacctgaggtcgggagtttgagacctgcctgaccaacatggagaaaccacatctctactaaaaatacaaaattagcagggcatggtggcgcacacctgtaatcccagctactccagaggctgagagaggagaatcctttgaacccaggaggcagagcttgcagtgagccaagatcgcaccactgcactccagcctgggcaacagagcaagactccatctcaaaaaataaataaataaataaaagcacaatattatactggacagcaggaagagctgtgttgggtataacagagctttctttttcttctatgtggctatttcattctgctcacgtggggaacttcacacatttaactcatttatacatttttttacacatgtattttggtcagtacgtttttgttacatttatgtgtccaggaagaaattagagctggtggtattttgctatgtcatcttgcttatgtagtttgtataattttataggttagatttgtaaagtatatttatttatctgagtctagcaattgaagtaatgtgattttactgtttctttctgttatgtgttctcattttgcccaagacctttggccagagcagagcataaaagattctttccaaaaagtgatacttagaagatatgaaaaatgtggatatgacaatttacagttaaaaaaaggctgtgaaagtgtggatgagcatgagctgctcaaaagaggtaataatggtcttcaccacagtctgacaactacccagagaaaaatatttcaatgtgataaatatgggacagtctttcagaaattttcaaattgaaacagacctaagatacgacatactggaaaaaaatctttcaaatgtatagtatgcggcaaagcttttaactcgtcctcaaaccttactacacataagaaaattcatactggagagaaaccctacagatgtgaagaatgtggcaaagccttcaaaaggtcctcacaccttactgtacataagatagttcatactggagagaaatcctacaaatgtgaagaatgcgggaaagcctttaagcacccctcacatgttactgcacataagaaaattcatactggagggaaaccctacaaatgtgaagaatgtggcaaagactttaagtacacttctacccttattgcacataagagaattcatactggagagaagccctacaaatgtgaagaatgtggcaaagacttttaagtgcacttctaaccttactacacataagagaattcatactggagagaagccctacaaatgtaaagaatgtggcaaagcttttcacctatcctcacaccttactacacataagatacttcatactggagagaagccctacaggtgtaaagaatgtggcaaagcttttaaccattccacaatccttttttcacacaaaaaaattcatactggagagaaattctacaaatgtgatgaatgtggcaaaacctttacctggccctcactactctctaaacacaggagaactcatactggagagaaaccctacaaatgtgaagtgtgtggcaaagcctttactgcatccttaactctaactgaacatcagagaattcatactggagagaaaccttacaaatgtgaagaatgtggcaaagcttttaactggtcctcataccttcataaacataagagaattcatattgcacagaaaccctacatagtgaagaatgtggcaaacattttaaatattcctccacttttaataagcataagataattcatactggagagaaactggatgaatgtgggaaagcctttaaccagccctcgactcttactaactatgagaatttatatggaacataaactcatacaaatataacaaatataaaaaatgtgacaaagctttttttaaaatttttttatttatttttttattatactttaagttttagggtacatgtgcacattgtgcaggttagttacatatgtatacatgtgccatgctggtgcgctgcacccactaactcgtcatctagcattaggtatatctcccaatgctatccctcccccctccccccaccccaccacagtccccagagtgtgatattccccttcctgtgtccatgtgatctcattgttcaattcccacctatgagaatatgcggtgtttggttttttgttcttgcgatagtttactgagaatgatgatttccagtttcatccatgtccctacaaaggacatgaactcatcattttttatggctgcatagtattccatggtgtatatgtgccacattttcttaatccagtctatcattgttggacatttgggtgacaaagcttttaaaggaagttctcaacctttattacacgtaattcatactggacagaaaccctacaagtgtgaagaatgtggcatggcctataagaagttctcaattccatttttttttttttttttgagatgaaatttcagtcttgtcacccaggctggagtacaatggcatgatcttggctcactgcaacctctacctcctgggttcaagccattctcctgtcttagcctcccaagtagctgggattacagttgcccaccaccacgtctggctaattttttgtatttctagtagagacggggtttcacaatgttggccagtctggtctcgaactcttgacctcaggtgatccacccaccttggcctcccaaagtcctagggttacaggcatgagccaccatgcctggctacaggttttcaattcttaagagacatggtgataattcatgctggagaggaaatctacaaacctgaaagatgtgacagtgctttttaccaacacctccaaatttcctatacataaaaataaattacactaatgtgaaaccctagaaatgtataaaatgtgacaaagcctttatatggttgtgacactgattgtaggtaagataattcatactggcaaaactcctacaagtgtgaagaatgtggtaaaacttttaatcagtgcttacaccgtatttcacaggaaagctattatccttgagaaaaattgtacaaatataaagaatatggaaaagccattaatgcccatcacatcttactcaacagaagaaagctcgtagttaataaaagcatgaaaagggcaattactgtcaaaaaatctttcagaaaatataagcctttagagtgaagaatatttattttgaagacagccattacaaatataaagtgggttgtagtgcctttacttgtgtcacagatcttattgaacacatttgtactagaagaaaaccctgaagcagttgctcaagctttgctcaacattggaatttatattggagaagagtcctgctaatgaatttggaaagccctttttttttttttcaaaaactgcagcttagaaaacaccagagagcttatactaaaatatatttttgcagatgcagtaaatataaaaaaatttaattcaaaattgattctatgtaaatatcagataatttacagcaaaataactaaggcactgacacttcagacattacactaaatcagagtgttgagtataaaaactaatccacagctacagctgttaaattatttgtatataactttaaaagtagtagatttttttttttttttttgagacggagtctcgctctgtcgcccaggctggagtgcagtggcgggatctcggctcactgcaagctccgcctcccgggttcacgccattctcctgcctcagcctcccaagtagctgggactacaggcgcccgccactacgcccggctaatttttcgtatttttagtagagacggggtttcaccgttttagccgggatggtctcgatctcctgacctcgtgatccgcccgcctcggcctcccaaagtgctgggattacaggcgtgagccgccgcgcccggcctaaaagtagtagatttttttgaagcattgtagttacattgaaagtatagttgtttccttgaaaaaacaattttgaaaagtgaataaatatgtaatatggttttcatattactttatgctgttatttctattgtgctcacatgtgaaagcatgtgatcaattgttgctgcatcagatatattagagattgtttactaattgggcattacttagaaccttttctataaaagagtaagaacatcaaaatctatgatggatgatgaaaatgtaagtggagcgcctttttgtagttaacttatactaagtaatgtataaggtgggggttcatgttctcatttgtattatcgtaccctataacttaatgttgacactttgctttgtcttttggatggcctaacctacattaacatgtatgcagaacatcttaaaacttttttttcaaaagttataatgaattactttattagtaacaaagattaaaaaaggtgggggttcagagtaatatttttctacattatagtgagataaaaattattatagttaaaagtattaaattagtatattattttactagttgtacttttatgtaataaaatgcagtacacttcaaaattgttagattttgaacttaattttatttttttaccatgttaagactattgtgcatttaatgaagcattattatgccacttaactttaacctatttaaccttactcaacagtgtaggtaaaagatggtagcaatatactatttggttcatagtggaataacatctctagtaatccctttgccagtggctttaaactgtaaatcagctgaagaatattttcccactggttaaatttttattcttttttcttattgaaattaattattagtattttggggtatatagtatgtgtatatatttattccttatatggcatattttgattcaggcatacaatatgtagtaattacattagggtaaataaggtatccatcacctctagcatttatcttttctgttacaaagagtgtaattaacacttttagtgtataatttagtgaggcaggtggattgcctgaggtcaggagttcaagagcagcctggccaacatgctgaaagcccgtgtctattaaaaattcagaaattaaccaggcatggtagtgcaagcctggaggctgaggcaggagagtcgcttgaatcccttaggtggaggttgcagtgagctgagatcatgccactgcactccggactggggaatagagcgagactccctctcaaaaaaaagtgaaagaaatataaataaaattcttacattcttagtcctgaaaaattattaataaacaattgttatttaattgtttttgaacatgtggtctctctgcctgcaaacatatacacttttagttttaatttacatatagttaaatatacacatattactctgaagataactttaggtgtaagaaaattattcagtgagtaagtgtgtttgtgtgagtatgagtttgtacatattttcagaagaaaagagcaattattggaacaaaatgaattattttaatagggtaactaataaaaaactaaacaccttgaaaatgctgaaagcaaatccacactttctgctttgtcttgaatttattaatgtaaaattttatggcttatgtctcagattctccccagaatctgcctattaaagcacaggcaattttgtctccagaaataacactcttgactacaacaataaaagccctcttcaaacaaaaaatcatttttaacacttattttaatgaaaatttaaccacaattgaataattggtatatttttattgttctgtgtgtgaatgtataaaacagtacataaagaagccagaaaaaaagatgttaatatttgtaatgaattaaactggaaagttattaattattatttgcaggtgatatctttgattatgtagataagaaaagcagcagaaagacttttaaaagtttattcaggtgggtaagcaatattctaagataataccctggattcccagtctgttgcacacctgcggtggaatactctcgagtgtaaaaatgtgactgtggtgggacatcactcatgaaattaggttacccatgtgttgactttgtgtttatcaaaatggagattatcctgactgtgctaaacttaatcagaggtgtttttaagagaaaaagacacattataggaaaacacccctgctggcctgaaagtgacttctataggtggaacatgttgtaagctgcttatggtggccacatggcaggaaacatgcttgtatattgtcatcatttctgcctcttgcatgttgttcccagtagggagaataagaggttcctatggcagatggaaaaaaggggaatctcattcatgcaagaaataatcacctctcatctgggatagcttaagagaaacaggagaccacaaaaagactacattaatgggaggaaaagggtaacctggctaaaagtgctcactggcattaaggaacaacatttagtaagctgtagtgaacgatcagcctctgggatactgatagtctaccaataaggttgaacttattctaattcagtcaacatctctgcaccattctggtgacccaggtttacactattcattacagaaatgccatgaaaaccagtgggtaatgtcctagaattgaacttacttcaaaaggcatacctttttgttttcacatttgaaaaacctcaaaaacagtgaatttataattaacttctaattatagaggattctactatactgtaatagattaaactgtaaagaacttaatatgaatatttcttgaatacataattagttgtgtagatagtttcttttagattaacatgaaaaaactattagagaaaacatttgaaatgagataaaattaatcaagaccacaacttttcagtgggttggcctaattgccatgcttttggagatggccagacgactaacaagaaacagacaagatttggctttgctcaatgattgttttgcaccttttgaaatctaacatcctggctaaagtattcaaagggaatattttatagatggcttctcagggtttccaaggcaatgaaagaaaaattttgataggcaggaaaatgcacactgtctacacacattgctcttctctgatttgctttaatactgaaaaattgaagattgtaaatgtcatctcaatttagagtaaattaacaaaagatttgtttttgaaaaaagcaaatgtataaaattaatgggtaacggatgccattagcttctaaaaactagtatgactaaattcagtaagtatctagccatgcaaatatcagcccaattaaatgaagaccctcataggtgcatgtggaaagcattgctgtgcagtgtggtgcctccactcagcattttcttctgcctcttcatagagaaaccagtttcccctgagtgactcacggtgcatactggggactgagaatgctgtgttcagagtgattactgaaaacgtggttaatacacttcttctatacgataataaaatgttataaatcttactctgcctcagaaaagcttttagtaaaagtttatagtactcaatttgggttaatggaaaatttcagtattccagataattcagacacttaaatgtcagtgaaatcccataaaacatatttgaataagataaagtcttctttgctgagaattttatattactggtaaatttagaaaaccagtactttaagccaattagcagtgtttgacatgtgagtcgcacccagacaagtgctcttcatgatcattgttaaagcagcaatagcaccacgtgctttcctgggacctgctgtcctgttttccacgatataaagtggagaaggcattgaaatggcaaaggagtgtgatataaattgaatacttatatgaaacaaaattttaaataaaaaatagcacttgaagttgtacaactataggtgagactattagtgtgaggtcatatttttacttatactgacaaaataaccacaatattcttatttagaataatattccttttctgctatatatttgctagtttttgataaaatactatgggagctcaatagaaatcaacaaaatgaatcttaattttaccagaagcattattgatgcatatgcttgttttttcttaagatccattagctttctatgaaagatttatacttttttttcagtgtcttatttattgcttagaagtggctctcctgccagaaaactgttattctcagctgtacccatgttgactagtagtgagtagaagcgaagtggataaaaagtaaatgtatcttctctgtatcttttttcatccattggctgaagaacagaaggatgaagaagatgaaagcaaatataatctctgaaagatcatgaagctctgttaaccagacaaaaatccccatagtggatgtgtgttaattttatttatttatttttattgtactgcctacttctatgagttgaatttttttttttttttgagatggagtcttgctctgttgcccaggctggaggggaggaatggcacgatcttggctcactgcaacctccaaatcccaggttcaagcggatctcctgcctcagtctgttgagtagctgggattacaggcacgcaccaccacccccagctaatttctgtatttttagagtagacacagggtttcaccaggttggtcaggccggtcttgaacttctcatttagtgatttgcctgcctcggcctcccaaagttctgggattataggtgtgagccactgcgctgggcaagtttaaattttttttttttacactttatatggaaataggattatgtgggctgggcccggtggctcatgcctgtaatcccaccaatttgggaggccgagatgggtggatcacttgaggtcaggagttcaagatcagcctggccaacatggtgaaaccccatctctactaaaaatatgaaaattagttggacgtggtggtaggagcctgtaatttcaggtactgaggcggctgaggcagaagaatcacatgaacccaggaggcggaggtttaagtgagctgagatggtgttactgcaccatcgcctgggcaatgagctaaactccgtctccaaaaaaataaataggatttttgtgtgtgtgtttttctgtgctggcttattttacttagcataatattttttaggttcatgaatgttgtagcaaataacaagactttcttatttctaagggctgaatagcatttaattgtgtacatataccacattttctttctccacctattgatggacacttaggttggttccataccttagctattgtgagtaatccacttccttccttctcttttgttttgtttttgatttgttttgagacgagtctcatctgtggcccaagctggagttcagtgtcgcgatcttggctcactgcaacctctgcctcgcaggttcaagccattttagtgcctcagcctttgcgcctggccaaaaatatattttaaataaggtacttatgaccgagcgtggtggctcacacctgtaatcccagcactttgggaggccaaggtgggcagatcatctgaggtcacgagttcgagaccagcctggccaatgtggtgaaaccccgtctctactaaaaaatacaaaaaaaattagctgggtatggtggcaggtgccttaatcctaagtacttgggaggcagaggcaggagaatcgtttgaaccccggaggcagaggttgcagtgagctgagataaagccattgcactcaaacctgggggacaagagtgagacttctttcaataaataaatacttagatataaactaacaaatcttgtagaaaaaaacgagaaaaagacatggcattggtcttggcaccatttccctagataccacattaaatgcatgaacaacaaataaaagtttaactacactagactttaaaatttctgcacatccaaacaaaattgaagagtgacaacgtcacttagaaaatgggtgaaaacattggcaaattacatgtgaaaaaagtgaatattcaaaatatataaacaactcttaaaactaaacaataaagttaaataacttgatttaaaaatggaggaacaaaattttcatcaaaaagatacccaaaaggacacacaaattgggcacatgggctcacgcctgtaatctcagcactctgggaggccgaggcgggtggatcacctgaggtcgggtgttctagaccagcccgaccaacatggagaaatgccgactatactaaacacaaaattagccgggcgtggtggcacatgcctgtaatctcagctattcaggaggctgaggcacgagaatcacttgaacccgggaggtgcaggttgcagtgagccaagatcgcaccactgcacttccagcctgggtgacagagtgtgaattcatctcaaaaaaaaaaaaaatttgttagataattgcaatatttaactgttactgtatactcatcaaatgcagatattttgaatcattgccatgaactgtgtggcagtaagatttcagagaatatgcagtataattataaataatattctaatgagaaacttttaataaataagcatttaaaagaaactagagttactttttatgttttaaatatatgctattcttacacaaaatggaactgctgtaatccaacttaagaagcaaagaacagccttacattgttaaatacagaaaatacatacatatatatatttggcagaatagggttagaccctctgatatgcaaaacaaatattaggaaataaactatggtattatttagatacaggctgaagaaagtagaagaaaatcctataattcctttttgcttgcagcaaacttaaatatataagtaactattttggtaagtgtggagtgcctcctaattatgtaatttactgtaggcatatcatacaaattctaggatattgtcctaaatatctgaatctaaaattacaaatttgaaatagaaaatagaaagtaaaaatatatagggagaaggacatcagtaagatgaaaagattaaaagtgccctgttttcatatcccattacagcaaaaaaaagtcagctatttctgacaaaaatgcctatattggccagccggggtggctgatgcctttaatcccagaaatttggagggtcgaggctggaagatcacgaggtcaggagtttgagaccagcccagccaacatggtgaagacccatttctaataaaatacaaaaaaattagccggttatggtgatgcacgcctgtaatcctagctatgcagaaggctgaggcaggagaattgcttgaacccagaaggtggaggttgcagtgagctgagatggccccactgcactccagcctgggtggcagagtgagactccatctcagagagagaaaaaaaaaagcctttattcgagaaccaggcattatggctcacacctgtaatgacagctacatggtacattaaggttggagaactgcttcaggccaggatttcgagaccagcctgggttatgtagcaacatgacatctccaaaataagtgtctgtaagagagatttgagatccagggagggagttctgaaacactgttaaagcttaagattgagaagagttctattcagaaggcaggccctcattcaagtgggaaactacaggtcctgcagatcttggcctttactggggtccccaaagcagttcaatgactcagcttcagttacctgagccacagtttatggccagttctgcctacatagaaatccacacagttacctgaggaaatggtctctggtactcagtgaaagccatacttacccacatcctgatacaaggcccaccgtatgcagacccgactgcaaaaacctgccctagggtctgccctactgagcaaagtcctgaaggatatgcagtctgtccaaaaataaaacgggaattacaacaacccaagtccctgtaacaagccgactaaaggtggaccctagtgcaggcccagcagccttgtcaccaagttacaccccctctccactaccaattcagagggcatctcctcaccctaagggcccaacaaaagaacaactttaccttctgaaatcaatttatgaaaacttgaaggggtgtttactccatcaaattcagacaccaagacaaaactagattttgcccattgtcaatggctctattttaatgtagcactggaagtatgtggcagaagaattagtcagagaaatttaaaaatgcatttaaattcaagaaaaataagtaaaagttgctgtttgtagatcatacaactatatatatatatatatatatatatatattttttttttttttttttttttttttttgagatggagttttgctcttgtagctcaggctggagtgaaatggcacgatgtcaactcaccacaacctctgcctaccgggattaagtgactgtctggcctcagcctctcgagtagctgggattacaggcatgtgccaccatacccagctaatttttgtatttttagtagagatgggggttttctccatgttggtcaggctggccttgaactcccgacctcaggtgattcacccacctcggcctcccaaagtgctgggattacaggtgtgagccactgcacccggcccatacaactttatatttgaaaaagcataaacagtatattaaaacctgtctaaactaataaatatactcagtaaattagccaaatataaaattaacataaaagtatatgtatggtttcatacacttaaactatctggtaaaatagaagaagaggctgggcagggtgactcatgcctgcaattccagcactttgggaggccgaggcgggtggatcatgtgaggtcaggagtttgagaccagcctggccaacatgctgaaaccttgtctctactaaaaattagctgggtgtggtggcaggcacctgcaatctcagctagtcaggaggctgaggcaagagaattgcttgaacccaggaggtggaggttgaagtgagcaacagtgcaagacatcatctcaaaagaaaaaaaaaaagaaaaaatagaggaaaaaaaatcttatttactatggcattaaataataaatttgtgagaaaaaattaaggaggtaaaaaaatccatacaataaaaaaagaaaaaaattagagaagatcacaataaattttaaattattttatgtgtattaattgaaagaataagtattgttaaagtgctatgttatccaaagtgatttatagattcattaaacttcctataaaaattgcagtggtatttttttcacaataatggaaaatacgattctaaaatttacatgaaactaaaataaactttgaatagccaaagcaaacttgaggtaaaagaacaaagcaggatatcatatttacaatttcaaactatatttcaagactatatagtaataaaaacagaatggactgtgcagaaaaatgtacaaaaaaaatgcaacgggatctactactctcacacatttcagtcccgatgcaaaaagagaacttaaaaaatagttttaatttctcgaaatcatgcagatatttgtgtgtcccaaaaacaatgaataataagccagtgcagtcttttacatgccattaagaggactttggctttcagtgtaaattgaaggaagctcacgtaaagaaaagtagaatccttaagagaatttaaaagtataagacagggctgggcgcagtggcgcatgcctgtaattccagcactttgggaggccaaggcgggccgattgcctgaggtcaggagtccgaggccagcctgagcaacatggagaaaccccttctgtaataaaaatacaaaattagccgggcgtgggggcgcaggcctgtaatcccagctactcggaaggctgaggcaggagaatcacttgaacccaggaaagggaggttgcggtgatctgagatcgtaccattgcactcctgcctgggcaacaagagtgaaactctgccttaaaaaagaaaaagcatagtcgggcgcggtggctcacgcctgtagtcccagaactttgggaggcggaggtgggcggatcacaccgtctggagttggagaccagcctggacaatatggtgaaaccccatctctactaaaactacaaaaattagcggggcatggggcggtctcctgtactcccagctactcgggaggctgaggcaggtaaattgcttgaacccgggaggtggaggttgcagtgagcagagattcagagattgcgccactgcactccagcctgggcgacagagcgagactcggtctcaaaaaaaaaaaaaaaaaaaaaaaaggcataagacagaagatgccctgtgtgagagcaaaatttaagaaaagaaaaaagaaaaactgcccagaaactatttcctttggagcacagcttcccaaatcacattttaaggactggctttctctttgaccttggcacctcttatctgtgttgtctgttgtattcattttcactcgcacctacctgggggtttggcaatcatctcatgtctcttcacagtgaaaggtttttttccctgctccagacaggtgatcaggtctggcttagagacaacaatacctcttttattaaaaataaataacaataatcttgctcatattctccaattacaagctagtactgtgctcagcagagaggatgtgataaaatattctagtaaattaataccaaaatactaagttataacagaaatttctaaatatttagaaaatactttcaatttgtaggtttcttaattttactacctggtactgctgaatcaaaaattgatggtggcaatgagattttcaggtgaggcaacaatattttatgtcgctaaatttctggaattaccactaatttagagtgaagaatacagctcatctcaggactgtggaaagtttagattaagataaaacctcttgaaaaaactattttctaaattaccaaattctgaaaattttctaaaaaaagaggatctgaaactctttttttttttttgagatggagttttgctttgttgcccaggctggagtgcagtggcacgatcacgactcactgcaacttccgtctcctgggttcaagcaattatttgcctcagctttttgagtagctggaattacaggcacccgccaccacacttagttagtttttttatttttagtagagacatggtttcaccatcttggccaggttggtcttgaactcctgatctcgtgattcacttgcctttgcttctcaaagtattgggattacaggtgtgagccaccacacctggccctgaaactcttttatgcaaagaataaattactaaaaacattctacaaaaaaagagaatgaattatgtattcaagttatcctcaccaaagaagaccaggtttctgtagttctttaacatgacatccatataaaaattctgctgtgcagtgtcccggcaatgccactcctccagagagaattctatggccacatctctaaattgcaatggtcccgaaaagacacacatacacacattttcaccaagtggccataggcagaatttttaatttgacttaaggtgaaatgagagagtaaggagaactggttctgacttataggactgactaaaattatccagtaaaataatttttcaacacagaaacatacattctctgatgtattctctaactctgagaaaatagatccacaacatcagttcatctatttttccatataataaagtataaaattaaggccataaacacgaacatgcatttttgagtgctgtatttttatcatacagaatgagttgtgaacatttttcagatggaaaagacatgttgagttagaaggcacatctcaagttttgttttgttttgttttgagacggagtttcaatctagttgcccaggctgaagtgcagtgatgtgatctcagctcactgcaacctctgcctcccaggttcaagtgattctcctgcctcagccttctaagtagctgggattataggcatgcaccaccacacctggataattttgtattttcagtaggatggggttttctctattttggccaggctggtctcgaactcctgaccttggatgatctgcccgcctcggcctcccaaagtgctgggattacaggcatgagccaccgggccaggccaattttttgaatttctaacaagctcaccagtaatgccaatattttgacccaagaaggatattttgtcaaacatgcagtaagtggaagagcttgtgtttttcccagtttttctagcctgtaaacaaagataggagccttcattttccaaagagaaatatgtagaaaaaaataagaaaaaaggacagccaccagattaaatgtgatgctttatgcacatcagctgcgtaaagatacttaatatgaagagaaaaataattacagtgaaaaaaatccatcagagagctatttcaccaagtgaatcattaaccattaactgcactaggacaaatttttatgatgtgctaatgcacacagaagaacacagcatcactgttgaaatattcctccccaaaaaagtaaattatagtctgaatttaaccataaagaaacatcagttttatgcaaacttcaaaccacagataactcctatgttctgtaattttaagtaggcttaatttagcaccctagaaaacaggtatctcctaattatttatttcagaattttctgggtaataaatgccatcccgttttaataagcatttatttattttttttgagacggagtctcactctgtcgcccaggctggagtacagtggcgcgatgtccgctcactgcaacctctgcctcccgggttcaagaaattctctgcctcagccttccaagtagttgggattacacatgcccgccaccacactcggataatttttgtatttttaatagagatggagtttcatcatcttggcaaggctggtcttgaactcctgaccttgtgatccacccgcctcagcctttcaaagtgctgggaatataggtgtgagccaccgcaccaggcctaaataagcattttcttaatcctgttcttcatagagctaatggaacacactgttggaacctcaacattacatgttctccatctttactaaggaccacagttttccccaatagaaatcttgagtatccacatctttccatgttcaacagccacaagggagcatttttaatattgcagatcataaatccttactgataattctgcatggcatataagaagttatgatgtagagaatgtagagaaggctctgggatataggaaagaaatatttttcagagacccttgactatcataagaattttaagaagtagttaaaccaaactcattagggagaaaaacagaagtagagaagcaaagttttctaagtactaaacacatggcagtccaggaggcagagtggacacagctcttcatctgacacatgtttacctgaagaaaagccatttttttctttctcctgcttctatggaattcattctcagatgagattctccacacaaattacacctgcatatggagaatatgcctttaaaggtgtcagtaccacatgtttacctgctagcatgacatcaaatggcagaaaaaagaatttcattcatttctgtcctttaaaacagaagagattcaggaacaatgagctgctccgtgaagttaaaaatataagttcctcctttcctgtcctgaggtgccctcccctgccacagacaccagcaatttctgctacagtaacggaaatatgcaccacactgacctgttcctaccaaacccaaacagaacaggccctgtgaccaccctttagtgcaaaggtggaacttaactctcatgaatgtatttggaagtcctcatacctgattctggccttaccttagagtcacatgaggcccttcattaaaacaacatggatccttccacccaggacaataaacagaagctgtggggagggcacaggacatttccgctaattggccatgtgatcctaatgagaagcctgggctgataaccactaagctaagcattgcctctcaagctttaatgagcttatatatcacttggtaattttggccctgctttatgtagtgtgattctggaggactgaaaagggtccatgaatgggtgttttaaacaagttccctgtcaatgctgatgttgttccccctgggctcattgttagcattagttagagaagcaggaacagcacagggttgcttacactcagcactcttgtcacaacctaatatttctggtacaaataaggacaatgcatgtccatcctaaagttttatattctttgctggctctttaaagtttacagagaaaacagaaggcagcaatgtctcaataattctgtatttaaagaacaacatgggtcgggctctgtggctcacacctgtaatttcagcactttgggaggccaaggcgggtagatcacaaagtcaagagatcgagcccatcctggccaacatggtgaaaccccgtctctactaaaaatacaaaaattagctgggcatggtggcgcgtgcctgtaatccagccactcgggaggctgaggcagaattgcttgaactcaggaggcggaggttgcagtgagctgagattgcaccactgcactgcagcctagggtgacagagtgagactccatctccaaaaaaaaaaacaaaaaaacaacatgtacacatgtactaatgcactatttattaggcaggtactatgtgctcaagagcatgatagaaagcactgtgctgggcctaacacgttatgtgatttaatcctcgaaacaccttgggagctggcactaagtgtttaataatttccaggatttagataaagggcccagcattttttcttcttctgtttctctgtcatcaaaatttttaaaaaactgtaaagagtaaaagctaaatataggcagatgaaggagacatagaaaggaagagtttaacatagtttaaattttattctgtttacgtttacttttttgtgacttgtggaataactactggatctgcaggaagagaaaacaagttgctaaatgactctgcacgcactggttttaatagagaatttataaaatatgaccctaaaatacacactttgtttttcctgtttatgtttttgtgttccaggaaattgtgaacaccacttctagaaaggcagcaggattcaccagccaaaactctgatctcttctaatcagttctgtgaggccagactccaaggtagagtcagacctaaataaggcctccaaaaaggataaatctgaacaggtctggggcagggcaaggcccctatgtagaattctgttctctataccattagggtacttccagttttgttttttctaagctaacctaaaagaaacttaaatcccagagtttctctaattttaatattttctagccactgtcctgtcaactttatactatatactaatatgcaatttaaacaaatcccttatggtttcctagggtaattttattaaaaaataaatacgtacacttaacaaagtaaaataaatagaaattatatggccggcactgtggctcatacctgtaatcccagcactttgggtggccaaggttggtggaacacgaggtcaggagttcaagaccagcctgaccaagatggtgaacccttgtctctactaaaaatataaaaattagttgggcgtggtggcaggcatctgtaatcccagctactcaggaggctgagacaggagtatcacttgaatctgaatggcagagcttgcggtgagtcgagattgtgccactgcactccagaatgggtgacagagtgagactttatctcaaaaattaaaaagtaattagaataacaattcctctgttcataaatatcccttatgtgtagatgtcagaaatcacaacaatataaaggaagtggcccaaataaagcttaagattttggacacatctatttattgtaccaaccatatgatgcataatccaattatttatctggttgctagtctagactaaaagcttctgggttgtaggaaccatgactacttcatggttttttttttaatggccatatgagatggaagcaactagtttatctattcgggtctccagatctcctccttgtttatcatccaagtaccaggaaactggataaactctcatctgggtaccaaccaaagacacctcttgtatgaggggaggaacaaacacagatgactcatttctcttacactgagacagaagcagaattaaccatttttgtcaacctgacacaattctgttctggacatcctcaaatgcctcaaagacacctaggttattgtgagattattagatatcattgggctgatggcccaatgataagccaggctgcagactcgggctgtttctaaatagaaaatggaactgcactggtggagctccagaacttggatcacccgttctgatttgctagctcttgggtaaaagaaagaacaaaaatactctactccagtatcacattttacaggtaaatatagttgtggtcatggctctggatactttgtggccttgatctctcactccaaagatgcttatttacacttacagattctgccatcagattctatttcctcctggaacctctcacatcactgtagcaggtcaatgaacaagatgtgaaacatctcacagagccacattcccaaatgggggctgtaagctgtctttgctgacatctcacaaggcagaaaatgccatttgttagttctctgtacattcacaatccaaagaccagcccttttttgtaaatcccaggcagaggccagaccttatctgcagattctaggtaggatccacctggctctgcatcctttggtgttacagcaagtggagtacaatccgaggagagatcccctcatagaggctcctctagcacattctaaatgataagtctacatgaaataaaaaaaaaaagctgacacaacatcaatataagtagacagtttatttgggtcaagctgaaggattataatctgggagcaaagattcaagttgtctggaatctacactttgattggcatcagttacaagaggatttgtaaagataacaagagaagaacagagtaggtagacacaaagttgtttgtcagaaatttttatgtatttagagaaatagcatttattattgattagatatatatagttatggtttaggatatgggatatagtgtccaacgtgtcattattagtttaatttatagctacttttggcaatcgtgaacagtttcaagagatgaatacatagttcaaaggagggagaaataactgcactttcattttcatgtctctgagtttgataaccaaaggacttgcattttttagataaaagttttttatttcccaaatctcaagacctaaattcaaaatttggagctgcagatttaggggctgaaggactggagcagcagcagatgttacctgaacatttgtgagcactttagcaagaggagaaaggggaacgtggagattctcatgtctctatgtctactaatgcacatgttactgtgattgggtttctgggctaaatagtttttgtatcagtttcaggcctgaagatacaagagtcattgatagaggtaaaatgattgattgttgccctgtgaagtttgtagaaatgtggtctagcctctctagaagtgactctagaggactatagataccaaataggaagagacacaattctgcctccatatttaggggacagcatgcattttgaagtgcaaatgtgagttgactggaagcctgagaggaaaagtcccctctagagtaaattctggttggcaccttatgtgtttttatcatgtctggtaattctagacagtgtttggaaatgattaaaagaaaaattttctccagccccagagaaactccacaaaagtagcacagaaagaaaatggttttattacacaattgaacttaattgtgacatgcatcatcatcagtctgcttaagggatcgcaaagacagaaagatggtcaccataattagttcacaaatagaagaatttccagcgccatgtcatacatagttcatcctatgaacagattgaagaggccatctgtgtatgctaattgcttatattcaatgacaaacttttcacatcttcataacaggaagtagtttagtagctttaatccaggtgccttctgaaggtaggctttcattgtgctacaaaaatggttgaatagggttctatctttttggctatttacattttagagcagtggctctgtactccctggcattgggttacagcactcctgcttgctttctcctggttactagtggcctctttttttttttttttttgagacggagtcttcctctgtcgcccaggctggagtgcagtggcgcaatctcagctcactccaagctccgcctcctgggttcatgccattctcctgcctcagcctcccgagtagctgggactacaggtgcctgccaccatgcctggcctggctaattttttgtatttttagtagagacggggtttcaccatattagccaggatggtctccatctcctgacctcgtgatccgcccgtcttggcctcccaaagtgctgggattacaggcgtgagccaccgcgcccagcctagtgtcctctcttgacctataacatctgccactgaggcacagcctggagcacagctcacattttatatgaaccccatttgccacagcagcactctagtgtcacatcagagagtgaggcctgagctgcaggaggagagcctgcaggcctcctgggtagaattacaccttcacaatcatgagaatgtgattagtgtttcagcctcagtttctacctatagtagggacatggaaaaaatactgctgaatttccagcataagtccagatagaaatagctctaaaagttctcgctatgaaagtccacctcatgtagacaccatcggatatgaatagggcttttgaaacagacacccaaagcattggagagaaaaacagatctccatctgagccagattattttgagagaaaaaagttcaaaagatcttaagaaaaagctcatattagatataagattgatcagccagaagatattcccctaaaagcaatttctctgtaaacactcaaagtgcacagctactctcagcatgagaaacatgagccttatgaaaaaaaagtgcagtttttcagaagaattttatagcctttttcccatctttgctggtctgtcatctcctagccattaaattggggttctatattgaaatacatctgacaactttcaacaacactttttgatgaagaaatagaaactgactgtgttcatatagtggaacatattagaactggcaacatcgttaactgcagagctattatggtttttgggtggccacatcacctgtctcctgtaataacagcattccaatttagtaaaataaaagatacacaaattgtgtttactcacaattttccctattgaataaagcaataaacttgtcactaatatctactgtaaaaatttggtagtaaattttctttggatattagatataaagatctaagtatgaataattttaatgaaccggtcataatgtattcagtatttttaaaaattgcaactacatagctgggcatggtggctcatgcccgtaatcccagcactttgggagtctgaggcaggcggatcaccggaggtcgtgagtttgagaccagcatgaccgacatggagaaaccctgtctctactaaaaatacaaaattagctaggccaggtgtggcacatgcctgcaatcccagctactcaggaggttgaggcaggagaatcccttgaacctgggaggcggaggttgcagtgagccgagatcgcgccattgcactccagcctgggcaacaagagcgaaactctgtttcaaaaaaaaaaaaattgccactacagttaggtgcagtgtctcacacctgtagtcccagcactctgttaggccgaagcatgtggatcaccaggtcaggagttcaacaccagcctggcaaatatggtgaaaccccgtctctactaaaaatacaaaaaaaattaccttggcgtggtgcagcgcgcctctcatcccagctacccgggaggctgaagcagaagaatcgcttgaagccaggaggcagaggttgctgtgagccaagatcaagccactgcactccagcctggctgaaaaagcaagactccgtctcaaaaaaaaaaaaaaagaaaaagaaaaaaaattgcaactatacttcagttaaaacactttatatttcaaaagtataaataaaataaccatttaagcgattaattcaaagtaagtattgtggcttaatattcataggattgtagaatacagtgtttatggctcatgcctgtaatcccagtactttggaagagtgaggcaggtggatcacctgaggtcaagatcaagctggccaacatggtgagaccccatctctactaaaaatacaaaaacctacccaggcttggtgttgcatgcttgtaatcccagctgcacgggaggctgaggcaggagaatcacttgaacccaggaggtagaggttgcagtgagctgagatcaagccactgcattccagcctatgcaacagagggagactgtctaaaaaaaaactgaggtcaaaataagtaaacaaatcttttcaaggtacagatccaatcacccaccccatcctgttcacttacatgcgcaataaccaccctcccaggagacactgcactatgccccagtgagtgccccaggtgcattttactttgtaagttatttatgccatctcactggggtcagttttttgtcttttggagtgttttttcactatttttctgcccctcccacaagataatccagaagacagaaattatttgttttcccctcaataccagcatctgattgactgaccagcaatgtgtctcctagaaatgaaagccaggttgagtgaagacaatcttcatgtctcaaggggttagcttttcaaaaaaaaaaaagtgcaccagaagatgcctttcagccccaaggctgccacctgctcccttgaaagtctacactccatgcttcaggtggtcctatgggagaaaatgacccaagagataatagtcactagacactctagcagacatagccatagtgggtatgttggtttattcccagaaagtactaaaacccaggaccagaaaaaaactgaaggttggctgaggacacatcatcctacaaagtttccaaagggtaatcttgacccaaaaacattccggtaagttctctggaaaaataaaagaaaaagaggcgccagacacggtggctcacacctgtaatcccagcactttggaacgcagaggcgggcggatcacgaggtcaagagatccaggccatcctggccaacatggtgaaacctctctagctgggcatggtggcacatgactgtagttccagctactcaggaggctgaggcaggataattgcttgaacccgggaggtggaggttgcagtgagcccagatcgcgcggctgcacaactgtaggacctcactccagtctggcaacagagcgaaaactctgtctcaaaaagcaaaacaaaaaaaagaaaaaagaaaaagacacaaatattttttacaatacagtgtcaggggattattctttgctttcttctcctgggaaatatttacaaacagaaaacaaatattttcaatagtgttatgccatgctttttaaagaatgattaattgaggaacatggggtacacttgaggccctgcttgggacacatgtgaaaaatgccagggaaaaatcagttccctgtgaggtgtgaaaataattaattgcactttttgttaaattactatattaagggaaataaaattcaagcttacacaactataaactgccaattaagctctgaatcataactaggacatttccacctcgattgtacaaaataagaaactacgtaactatacctaaccaacgattgaatatggttttcttcatcatgcaccttataaatgtctttccttcaagcccctaccatggaccataaagtacaaactatagctgggtgctcaacaattcttgaatcactctttaattaaattatttgatatttttgcggcgactctcatattttttttttttagacagagttttgctctgtcgcccaggctggagtgcagtggtaagatatcagcccctgcaacctctgcctcttgggttcaagcgattctgtcacctctgccttccaagtagctgggattacagacattcgccatcacacccagctaatttttgtatttttagtagagatggggtttcctcattttgaccaggctcgtcttcaactcctgacctcaagtgatccgcccgcctcggcctcccaaagtgctaggattccaggcgtgagccaccgcgcaagggcccatacatttttaataggagaaaagggaaactgtgaagaccaagcaccaaagctcttcccattcatgaacttgcatcctgagtcaggattctcccctgaggaccctcccgtggtccctgcacgatctgggagacacgtggcgctgtgggtgcagagctgcccggagagggctccaggccagggcacagtcactgcgaggggaagagacaggacgccggggggcccgggtgtgagcgcagcctccatcttacggctgaaagggactgaggccgagctgggcaaggagaacttggggcgcagattgcggagctgactgcggggaggcctgagtcccgccacagccacttcccaccggttccaaccagttcctcccctgctctcgtgatgtccgacggcactcaccatttctaggcttccaggaggtcctggcgtcttagctgtggatctcccaaaaccgtcaggtcacagggctgggcctccagcagcagaggacacagagtagtgaagatgagacctggagctccaggtgcagtgagagacaaaggccccgccaaactcggaagtcgacctgttcgctccagctgggtgtctgattggacggtttccagcccagtgtccctgattggataatgcttaaggcctcgccccttcaggacctagtgagagaagatgtgataagatgctgcgctgagcaatgaaagagtcacagcctaagctgcatctttttcaggcagggctttctcccagagctgagccaggcccaccccagagcatgggaaaattctatctcttttttgctctctctttttgaatgtattcgaaaggtgaacggaagtactttgctgttatattaataatacgtaaaatttttgttcaagagaaaatcaacttttactttggtaatagtgtattatcaatactaaagctaattttaataaaaccttataaacaaatcaaatttgtcatttttgacctttcgagatttgcatatatattttgtaatctcttgtaatttttaaactatttatattttacttatatctacattccttttattttttcaatttgaaacaacctttaagtaatttcaaactgctataggagatagaaagcatttagggacagggactgtggctcacgcctctaatcccagcactttgagaggccaaggtgggcagactacttgaggtcaggagttaaagaccagcctggccaatatggtgaaaccccatctctactaaaaatacaaaaatttagccgggcatgctggtgcacacctgtggtcccagctactacagaggccgaggcagaagaatcgcttgaacccaggaggcagaggttgtgtaaggcccaaggggttcaccttgccctttgcctagacagagctgattcatcaagacaggggaatttgtggaggaaaagttaaatattaaatttgaactcaattgaacgtggacacaaacaatgatcaccaagtccaggaagaggttgtgtgagacctttgatgcattcatccagtgctgttttggagaaatctctatttccatctattcctatactttacttattgaaaaacgatagacaatcacaaaaacaagttgacctttttgtgttccttgagcccagtcactaagggccctcgtgactgggctttatgccaaataaaagagctgggatcccagatggcgccgaagtttcatgagacctctcctcgtctgtgcgtggacgagtggccgactctgaagcccaggctgtggcttcctggtctggtggtgaatcctccacagtctggggagtgtggtgtctgactctggatcccagggctggaaactcaaggacttcctatatcccagttctcccccttgtcatgccccatctggtgagttttgggggaactcatgacccaagtcataataggaatttcaggcctcataaagacatcatggttgaagcagaggtgttctgtttccagcaaagccctataggaagctaacaattgcttctagaaagaggtataagctttgccggcctatgacagtttctgggtccaaaacctgaaatgtacctcttcccatcttgtttctgcctaacgctccaattagcatgttgatctaggacagttacttgcagttctactggcccatcccgtatggagcatagatccagggccagcagcaccacttgtttagcttgttcagaagccatgctctccttctttccccagtgaaagtcatagtgttttctagtggctgcatgcagaggttgtaaaatgttacccaagtggggaatatgatgtctccagaatccaaacaagacaatacatttctgagcctcctttttagcagcagggatttcaaattctagtattttagccttagcctttgataaaatggactatttcctcccattccataggatgcaaccagctcctatcttgacacattaacctataagcagtaagcaaacaccatccactctgggagatccctcagcatctgctttgctgactggaatcccctgcagcccttcatgcacagtcaaaagtttaaattgcactaatttagattcccaattctcacaaaggccagttcccctggaccattcaactgccaagggggagaagtgggggatttcccatctctggatatgggaagtccacgagcctctagccccgtccttgtggccaaaaagtggcacactttggttttcgaatcctgtttgtgacaccaaaaatattcgggtgggaaacacatgaggggagaaggaaagacacacacacaacacctttaatggtaaacaagtttattccacgtaagtggcaatgcagatataataagcaaatgatataataaacagatcaatataacaagcatattgatataagaaccacattgatataataagcaaattgcaatgggaagaggagaaaggaaaagatatatatatatatatatatatatatatttacactcactagagtatggaggtttcaccaccaaggtggtaagcaacagcctgggttccagagtcggccactcatttctgcacagatgaggacaggtctcatgaagctttggcgcagtctggtaccctcagttttttgtaacgagttgtttggcaggaggtccagtcacgagggccttccgcaactgggcacaaggaacacaaaaaggtcaacttgcttttgtgattgtctattgtttttcaataactaatgtatagaaatagattgaaatagagatatcactgaaacagctctgaatgaacaactcagaaggctcacacaacctgttccaggacttcgtgacaattgtttgtgtccacgtttaattgagttcaaatttaatatttaacttttcctccacaaattcccctgtcttgatgaatcatctctgtctaggcaaagggccaggtgaaccccttgggccttacacaacctccgcctcctgggttcaagcgattctcctgcctcagcctccgtggtagctgggactacagatgtgcaccagcacgccaggctaattttttttttttttttttttttttgagacggagcctcgctctatcgcccaggctggactgcagtggcgcaatctcggctcactgcaagctccacctcccgggttcacgccattctcctgcctcagcctcccgagtagctgggactacaggcgcccgccaccgcgcccgccaccgcgcccgcctaattttttgtatttttagtagagatggggtttcactgtgttggccaggctggtctttaactcctgacctcaagtattccactcaccttggcttcccaaagtgctgggattacaggcgtgagccaacgcacctgtccctaaatgatttctttctatctcctataacagtttgaaattacttaaaggttgtttcaaactgaaaaaataaaaagaatgtagatataaataaaatatagttaaaaaattacaggagattacaaattatatatgtaaatctcgagaggtcaaaaatgacaaattttgtttatttacaaggttttatttatgtatttattcatttttggagacgcagtctcactttgtcacccaggcttgagtgcagtggtgcgatcttggctcaccgcaacctctgcctcctgggttcaagccattctcctgcctcagcctcctgagtagctgggaccacaggtgcatgccaccacgcccgggtaattttttgtatttttagtagagacagagtttcaccgtgttagccaggatggtctcgatttcctgacccagtgatctgccctcctcagcctcccaaagtactgggattacaggcctgagccaccgcacctggctttacaaggtcttattaaaattagctttagtattgataatacactattaccaaagtaaaagttgactttctcttgaacaaacatttcatgtattattaatatgacagcaaagtacttctgttcaccttttgaatacattcaaaaagagagagaatatgagatagaattttcccatgctctgggatgggatgctcagctcagggaggaagccgtttgaaaaggctccagctaggctaggcgcggtggctcacgcttgtaatcccagcactttgggaggccgaggcgggcggatcacctgagatcgggagctcgagaccagcctgaccaacacggagaaaccctgtctctactaaaagtacaaaaaattagacgggcgtggtgaggcatgcctgtaatcccagctacatgggaggctgaggtaggagaatcgcttgaacccgggaggtgcaggttgcggtgagccaacatcgtgccattgcactctagcctgggcaacaagagggaaactccgtctcggtggggggaaaaaagaaagaaaagaaagaaagaaagaaagaaagaaaaagaaagaaagaaagaaaggaaagaaagaaagaaagaaagaaagaaagaaagaaagaaagaaagaaagaaagaaagaaagaaagaaagaaagaaagaaagaaagaaagaaagaaagaaagaaagaaagaaaaggctgcagcctaggctgtcactctttcttcactcagcccagtatctgatcacatctgtcactcagcggctggggaggcggggccttaggcattatccaatgagggacgctgggccggaaaccgtccaatcaggcacgcagctggagcgaaccacatggtttctgggggcctttgtttctcgctgcagcgggagctccaggtttatcctcagtgttctgtgtcctgtgcttatagaggcccgtcctctgtggccgtgtgacctgcaagtattgggagagccacagctaaaccccgggacccctggaagcctagaaatggtgagtgccgggtccaacgtcccgagagaggggagaggctgtttggaacggtgggaagtggctctggcgggactctgcttcctcacagtcagctccacaatctgccgccggagttctccctgcccagctcggcctcagtccccttcagccataagatggcggctgcggtgacatccggggcccggcacagtgattgtgccctggcctggagccctctttcagcagctctgcacccgcagcaccgcgtctctcccagatcatgcaaggaccacgggagggtcgtcaggggagaatcctgactcggttccctgcgggttcatgaatgggaagagctttggtccgtgaggttgttagaaacaagcgcttggtgccgcaaaacaacacaaaacaaaaaactacccagcacttagaaaatttcacaggaaggcatatttacttctgaagaagagtgctgctcgcgtccgacctgatcgcaagagcacacagaagaaaggaaggaaggttttttttttttttgaggcggagttttgctcttgtggcccaggctaaagtacaatggcgcgatctcggctcactgcaacctccgtctcccgggttcaagtgattctcctgcctcagcctcccgagtagctggggttacaggcatgcgtcaccacacccggctgattttgtatttttagtagacatgccgtttcaccatgttggtcaggctggttttgaactcccgaactcagttgatccgcccgcctcggcctcccagtttgaaaggggtttttaaccctaaacgccgttattgcctctgtgtccttcccccattggccggggtctgacctcacaatctaggctgacccgattggctactttccaaataaggaaggggttcgggtcgcagattggaacaggcggtttgggttgtttacggagcgggtgtctaggtacaaagaggtacaaaaaagttggtcctaagaacaaggaacaagaaagttaggcccttgaagaggaatctattatatctgtcagggttcacagtttcccttttctcctattaaaaatttatggggccgggcgcggtggctcacgcctgtaataacaacacttcaggaggtcgaggtggatggatcacttgaggtcaggagttgaagaccagcctggccaaaatggggaaaccccatctctactaaaagtacaaaaattagctgggtgtgatggcgaatgtctggttttctgtttctgcattagttttctgaaataatggtctacagctttattgatgttattgcaaaggacatgatcatttatttttaaatggccagagagtattccatgatatttatgtaccatattttgtttttactaaatcttttattttattttatttttggagacagagtgtcacttattgcccaggctagagtgctgtggagtgatgcagccttatttagcctcaacctccctggctcaagcaattctctcctacctcatcctttcacgtagcttgatctacacgctggtgttaccacgcctggccaatttttctctttgtattttctgtggagacaggattttgcaatgttgcccaggttggtcttaaacttctaagctcaggcaatccacctgcctcagcctcccagagtgctgggattacaggcatgagccaccgcatctgaccataccgtgttttctttatccagtctaccactgatagggcctgtccatgtctttgctattgtgaatagtgctgcaatgaacatacatatgaatgtatctttataatacaataatttatatttctttgggtatatacccaattatgaggtagagtataagcattcccttttctctgcaaccttgccagcatctgttattttttgactttttaaaaatagccattctgactggtgtgatgtggtatctcattgtggtttctcttaatttctctaatgattagtgatgagctttttttttttcatatgcttgctagccacatgtatatgttcttttgaaaagcatctattcatgtttttttggcctattttttaatgagattttttttttcttgtaaacttgtttaagttcttaataaattctggatattagacttttgtcagaggcaaagtttgcaaattttttttattctgtaggttgtctgtttactctgttaatagtttcctttgctgtgaagaagctctttagttcaaataggtcccattgtcaatttttgcttttgttgcaattgcttttggtagcttcatcatgaagtgtttgccagtttctgtgtctagaatggtacttcctaggttatcttgcaaggtttcttacaattttaagtttttcatttaagtctttaattaatcttgagttgattttgtatattgtgtaatgaaggggtccactttcagtcttctacatagtgctagctagttattccagcaccatttattaaatggagaattctttccacatttctcttatcagctttgccaaaaatctgatgatggtaggagggtggcattatttctgggctctctattctgttgcattggtcttgtgcactcatgaacttttttttataatatctttctctcttctgctttttcccccataagcattttttcaagtgcatacagtgtgtaaaattctgatgtccaagagttcaaaaactctttaaaaagttccaaaaaaggggattggggggctaggggagggacagcattaggagaaatacctagtgtaaataatggtttgatgggtgcagcaaaccttcatggcacgtgtatacctatgtaacaaacctgcacgttatgcacatgtaccccagaactttaaagtataataaataaataaaaagcttaaaaaatattttgatattctctcttttcttaaggaatttaggttatatgtagatgcttttctctgctttttttgaaatacatgtaaatcatatgaacagctaaataaaccctttgtcattttctcgggtccagattatctttatgtagtacttcagaattattgctttatttttgcttctgaaaagtttatttttttcatttttagtcctttaaattagacacagatttgtttagataaaagctcattttaagagcacacagaagcttagcagaaagataggattaaatttagcaatgcagaatgctaaagactaaaaggtattaagtttcttttacagaaacctgattatccaaggtaattatccaatatttgcaggctgaagtacttatactgcaaaagcaagaacagtgcataaacagtggagtctgtagttgtatcttgctttctatttattacttcagaacaattaggatagttatgtgtagggtttgtaggcaaactgcattaatataaattaaacattttttttttcgaggtgttttgctcttgttgtccaggatggtgtgcaatggtttgatctcggctcaggcaaactctgcctcccaggttcaagcaattttcctgtctcagctcccagtagctgggattacaggcatgcaccaccaggcccagctcattttgtatttttaatagagatgcggtttttccatgttgatcaggctggtcttgaactcctgacctcaggtgatctgcctgcctcagcctcccgaagtgatgggattacaggcatgagccaccatgcctggcctttttttttttttttttttttttttttaaaaaacagtcttactctgttgcccaggctggagtgcagtggtgtaatcttggctcactgcaatcactgccttctggtttcaagtaattctcctgcctcagcctcccgagtggctgggaatacaggcatgcaccaccatgtccggctacttttttgtatttttagtagagacaggatttcaccatgttggtcagactggtctcgaactcctgacctcaggtgatgcacctgcttcagcctccaaaagtgctggtattaccggtgtgagccaaaaacaatattttctacaatagtatgaacataaagccacaatacttactttgaatgattcacttaaatggttattttaatattgttatttatacttttgaaatataaagtgttttaactgaagtatagttgcagtttttaaaaatactacatacattgccgagtgcagtggctcacacctgtaattccaacactttgagaggctgaggcaggttaattacctgaggtcaggagttcgacaccagcctgacatggtgtaaccccatctctactaaaaataaaaaattagctgggtgtggtggcacgcgcctgtaatcccagctacttggcaggctgaggcaggagaatcgcttgttcctgggaggcagaagttgcagtgagctgagattgcaccatttcactccagcctgggtgacagaatgagattgtgtctcaaaaaaaaaaaaaaaagctacatatattatgacctgttcattaaaattattcatagttagatatttatatctaatgtccaaagaaaatttactaccaaattgttagagtagatattagtctgacatgtttattactttactcaataggaataattatgagtaaacacaattttattatcttttatttcactaagttggaatgctgctattacaggaaaaataaagacaggtgatgtggccacccaaacaccataatagctattcagttagctgtgttgcaagttgtaacatattccactatatgaacacagtcaaattctatttcttcatcttaaagtgttgttggaagttgtcagatgtatttcaatatagaacccccattcagtggctaggagatgagagagcagcagagatggaaaagaaactttataaaattcttctgaaaatctgccctctttcttcgtaatgctcatgtttctcatgatgagagcagctgtgtactttgggtggttagagagaaattgcttttaggggaacattttctggctcatttgatcaatctgatatctaacctgagcttttttaaaagatcttttttacatttttctctcaaaataatctggctcagatggagatctgtttttctctccaatgctttggatgtctgtttcagaagccctattactatcctatggtgtccaaatgaggtggactctcacagtgagaacttttggagctatctctatctggactcatgctggaaattcagcagtattttttccttgtcaccattacaagtagaaactgaggctgaaacactgctcacattcccatgattgtgaaggtgcaattctacccatgaggcctgcaggctctcctcctgcagctcaggcctcactctgatgtgacactggagtgctgctgtggcaaatggggttcatataaaatgtgagctgtgctctgaactgtgcctcagtggcagatggtagaggtcaagagaggaaggacactagcattcaggagaaagcaagcaggagtgctgtagcccagtgccagggagtacagagccactgctttaaaatgtaaatagccaaaaagatagaatgctactcagccatttttgtagcagagtgaaatcctgccttcagcagacacctggcttcaagctgctaaactacatcctgttatgaagatgtgaaaagtttgtcattgaatataagcaattaacatacacagatggcctcttcaatctccaggtgaatttaggatgaactatgtatgacatggtgctggaaattcttctaattgtagactaattatggtgaccatctttctgtctttggagcctcttaagcagattgacgatgatgcatatcacattcaagttcaattgtgtaataaaaccattttctttcttttgtcttattgtgaagattttctggggctggaggaaatttttcttttaattattgtttccaaacactgtctagaattaccagacatgatacaaacacataaagtgccatccaaaatttactctagaggggactttccctctctggcttccagtcagctcagagttgtgcagcaaagtgcatgctgtcccctaaatatgcaggcagaattgtgtctctgcctttttggcatctatagtcctctacagtcacttctagagaggctagatcacatttctaccaacttcactgggcagtgatcaatcgttttatctctcttagaatgactcttgcatcttcagacctgaaactgattcagacatcatggagctcacagaccgaatcagagtaacgtgtgcattgaatagatgtgtagacaagaatctccactttcccctttgtctttttgctaaaatccttacaaatgtgcaggtaacacctgctgctactccagccattcaggtcctaaatctgcagctccacattttgaatccaagtttttgagatttgggaaataaaaaacttttatctgacaaatgtaagtccttttgattatcaaactcagagagacgttgaaaataaagtgcagttatgtatttctcctccctttgaactatgtattcatctcttgaaactgttcactattgtcacaggtagctataaattaagctaatagtgccacattggacactatatcccataccctaaaccataactatatatatatatatatattattatatatatatatatataatcaagtttatttctgttaataaataaaaatatctgacaactttgtatcagcccactgtgtccctgttttgttgtctttaccaatcctcttataactgctgctaatcaaagtgtagattccaggcaacttgaatctttgctcccaggttataatccttaagcttgacccaaataaactgtctacttatattcatgttgtgtcagcttttttttctttcatgtagacttaccatttagaatgtgctagagcagcctctatgaggggatcttttctttgattgtattccacttgctgtaacaccaaaggatgcagagccaggtggatcctacctagaatctgcagataagttctggcctctaccacagatttacaaaaaagggccggactttggattgtgaacgtacagaaaactaacaaaaggcattttctgtattgtgagatgtcagcatagacatcctacagcccccatttgggaatgtggctctgtgagatttttcacatcttgttcattgacctgctacagttatgtcagaggctctaggaagaaatagaatctgatggcagaatctgtaagtgtaaataagcatcttaggagtgagagatcaaggccacaaagtatccagagccatgaccacaactatatttacctgtaaaatgggatactggagtagagtatttttgttctttctcttacccaaagagctagcaaatcagaacaggtgatccaggttctggagctccaccagtgcagttctgttttttatttagaatcagcccgagtctctccagcctggcttatcattgggccatcagccctgggacactgggaattctctcacagtctcctaggtgtatttgaggtatttgaggatgtccagagcagaattgtgtcaggctgaaaagtgtggttaattctgcttctgtctcagtgtaagagaaatgagtcatcctgtgtttgttcatcctctcatacaagaggtttctttggttggtaccaagatgagagtttctccagtttctggtgcttgaatgaaacaaggatgagatctggagacccaaatagataaagtatttccttacatctcatataaccattaaaaaaaatgaagcagtcatggttcctacaatccagaaacttttagtctagattagctactggataaataattgaattatgtgtcatatggttggtgcaataaatagatgtgtccaaaatcttgggctttatttagaccactttctttatattgttgtgacttgtgatgtctacacctgtagggatattcatgaacagaagaattgttattataattaatttttggttttttgagatagagtctctgtcgcccaggatggagtgcaatggcgggatctcagctaactgaaacctcggcctcccgggttcaagtgatactcctgtctcagcctccagagtgtccgggattacaggtgcccaccaccatgcccagctaattttttgtatttttagtagagatagggtttcaccatgatggtcaggctggtctttaactcctgacctcaggtggtctgcccgcctcggcctcccaaagtgctgggattacaggcaggagccaccgcgcccagccacatatttattttctaataaaattagcctaggaaggcctggtgcagtgcctcacacctgtaattttagcactttgggaggccgaagcgggcagatcacaaggtcaggcgttccaaaccagactggccattatggtgaaacgctgtctttactaaaaatacaaaaattagctaggcatggcggcacacgcttgtagtttcagctactcgggaggatgagtcaaaagaacagcttgaacctaggaggcggaggttgcagtgagccaagatcatgccagtgcgctccagcctgggcgacagagctccaaaaagaaaataaaaattaccctagaaaacctttggggatttgtttaaattgcatagtagtgtatagtataaagttgacagggcggtggctagaaaatataaaaattacagaaacaggccgggcgcagtggctcacgcctgtaatcccagcactttgggaggccgaggcaggtggatcacgaggtcaggagatcgagaccatcctggctaacacggtgaaaccccgtctctactaaaaatacaaaaaaattagccgggcgtggtggtgggcgcctgtagtcccagctacttgggaggctgaggcaggagaatggcgtgaacccgggaggcggagtttgcagttagccgagatcgcgccactgcactccagcctgggcgacagagagactccatctcaaacaaacaaacaaacaaattacagaaactctgagatttaagtttcttttagataagcttagaaaaaacaaaactggaagtaccctagtggcatagagaacagaattctacatagggttctcaccctatcctaggtctgttaagattcaccctttttggaggccttatttaggtctgcctctatcctggagtcttgcctcacagaactgatcagaagagatcagagttttggctggtgaatcctgctgcctttctagagctggtgcttagaatttactgaaactcaaaagcagataaatcagaaaaacaaagtatgtattagagggtgttagtttttaagttttctatgaatccagtgctaacagagacattctatttagcaacttggtttctattcctgcagatccagtagttgctcctcaagtcacaaaaaaagaagtaaatataaacagaataaaattttctctaaactacattaaactctttctttctttctttcttttttgagatggagtgtctctctgtcgcccaggctggagtgcagtggtggatctcggctcactgcaagctctgcctcctgggttcacgccattctcctgcctcagcctcccaagtagctggaactacgggcacccaccaccacgcccggctaattttttgtatttttagtagagacggggtttcaccgtgttagccaggatggtctcgatctcctgacctcgtgatccgcccgcctcggcctcccaaagtgctggaattacaggcgtgagccaccgcgcccagccattaaactctttctttctttatcttgaaatctgtctacatttagcttttattctatgtaatttttttaaaaagttgatgatggagaaacagaggaagaaataaaaatgctgggccctttatctaaatcctggaaattattaaacccttagtaccagcttccagggtattatgagaactaaatcacataatgtgttatgcccagcacagtgctctgtatcatattcttgagcacattgtacctcattaataaacattgcattagtacatgtgtacatgttgttttttaaatatagacttattcagacattgctgctttctgtttcttctgtaaactttaaagagccagcaaagaatataaaactttaggatggagttgggttgtctttatttgtaccagaagtatttggttgtgacaagagtgctgagtgtaagcgaccctgtgctgtgcctgcttctctaactaatgctaacaatgagcccagggggagcaacatcagcattgacagagaacttgtttaaaacacccatttatggacccttttcaaacctgcagaatcatattacataaagtggagtcaaaattatcaagtgatttataagctcattaaaactttacaggcagtgctctcattcatgagagttaagttccacctttgcactaaagggtggtcacagggcctgttctgtttgggtttggtagggataggtcagtgtggcacatatttccattactgtagcaaaaattgctggtgtctgtggcaggggagggcacctgaggacaggaaaggagaaacttatatttttatcttcatgaagcagctcattgttcctgaatctcttctgttttaaaggacagaaaagggtggactttttctgtgttttttttctttctgccatttgatgtcatgctagcaggtaaacaggtggtgctgacacttttaagggcatattatcaagatacgggtgtaatttgtacagagaatctcgtctgagaaggaattccagagaagcaagagagggaaaagtggcttttctgtttcagatcaagagctgtattcactctgcctcctcgaatgctatgcatttagtactcacaaacttttacttctctacttttgctttttttttaatgagtttggtttaagtacttcttaaaattcttatgatagtcaagagtctctgtaaaatatttattttctataccttagagccttctctacatttgctgcatcatagcttcttatatgccatgcaggattctcagcaagactttataatctgcaatattaaaaatgttcccttcgtggctgttgaacatggaaagacgtggatactcaagatttctattggggaaaactgtggtccttagtaaagatggagaacatgtaatgttgaggctccatctgtgtgttccattagctctatgcagaataggattagggaaatgcttatttaaaagggatggcagttattacccagaaagttctgaaagaaaattaaggtacctgctctctagggagctaaatgaagcctacttaaaattcctactaaaagttacagaacataggagttatctatattttgaagttagcataaaacatgtttctttatggttaaattcagattttatttactttctttgggaggaatatttcaacagtgatgctgtgttcttcttcttcttctttttttttttttaagaagagtttcactctcattgcccaggctggagtgcaatggtgcaatcttggctcactgcaacatctgcctcccaggttcaagcaattctcttgcctcagcctcctgagtagctgggattacaggcatgtgccacaacgcccagctaattttgtattatcaatagagacggggtttctccatgttggtcaggctggtctcgaactcccgacctcaggtgacccacccatctcggcctcccaaagtgctgaaattacaggcgtgagccaccatgcctggccgatgctgtgttcttctgtgtgaattagcacatcataaaaatttgtcctagtgcagttaagggttaatgattcacttggtgacatagctctctgacagatttttttttacaatagagttaattatttctctcttcattaagtatttttatgcagctgatgtgcataaaccatcacacttaatctggcgtctatcctttcttctcttttttgctacatatttttctttggaaaatgaaggctcttatctttgtttacaggccagaaaaactgggaaaaacacaggctcttccatttactcaatgtttgacaaaataccgttcttgggccaaaaacattcgcattagagatgagcttgtcagaaattcaaaaagtcagactttatgccagatcttccggaataaaaaaaaaccctgcacaacaaggtcttcagcttattgtgtatattaaaatttgagaggtgccttctaactcaacacatcttttgcatctgaaaaatattcacaactcattccatatgatgcaaatatagcactaaaaaatgttcatgttcatgcccttaattttatgctctattatctaaaaaatatcatatataaactgatgttatggatcttgtgccgctcttttttctcagagttagaggatacattagagaatatttttgggttgaaaaatattttattggataattttaggcagtcctttgagtcagaaccagttctctttactctctaatttcaccttaagtcaaattaaaaattcctctcatgccatttagtaattatgtgtgtgtgtgtgttttccagggaccattgcaatttagagatgtggccatagaattctctctggaggagtggcattgcctggacactgcacagcggaatttatatagggatgtgatgttagagaactacagaaacttggtcttccttggtgaggacaacttgaatatataattcataatataccctgaagattttatttctcttttttgtagaatgtttgttagtaatttattctttgcaaagtggtagaattacaggcataagccactgcgcctggccatattttatttatatttctgtataatttttattatgaccacaaagataaccctgtaatcaataacaatttaattgtacattcacaataactaaaagtgtataattacactgtttgtactacaaaggataaacgctagaggtgatggataccctatttaccctgatgtaattactacatattgtaggcctgaatcaaaatattccatataaggcataaatatatacatatactgtatgcccacaaatactagaataaatttcagtaagaacaaagaataaaaatttaaccgatgggaaaaatgttcttcaactcatttgcagtttaaagtcactggcaaagtgattactagacatgatattccactatgtaccaaatagtatattgctaccatgttttacctacatgcttgagtaaggtgggatatgtcaaagttggtagcataataatgcttcattaagcaaacaatagtcttaacatggtaaaaaaaaattaaataaaattaagttcacacataatctaataatatttaaatgtactgcattttattacataaaaatgcaattagtataatatacaaatttgatacttttaactataatttttctctttaatgtagaaaagtatttctctgaacccccaccttattttttatcattgtttattaataaagtaattcattatgtttttgaaaaaaagttttaaaatgttctgcgtacatgttaatgtaggctaggccatccaaaagacaaagcaaagcatcaacattaagtttgagaaatgagaacatgaacccctacctcatacattacttagtataagttaactacaaagagcctctccacttacattttcatcatgcatcttacattttaatgtccttactcttttatagaaaaagtcacaaataacgcccaataaaaaagaatctgtagtatctctgatgcagcaacaattgatcacatgctttcacttgtgaatacaataggaataaaataacagcataaagtaatctgaaaactgtattcactctaaattagtggtaactccagaaatttagtggcataaaatattgttgccccacctgaaaatctaattgctaccactaatttttgattcagtagtatcagatagtaaaataagaaacctacaaattgaaagtattttctaaatatttagaaatttctgttataaattattattttggtattgatttactggaatattttatcacatcctctctgctgagcacagtactagcttgtaatgggagtatatgagcaagattcatgttatttatttttaataaaacaggtattgttgtctctaagccagacctggttacctgtctggagcaaggaaaaaaacctttaactatggaaagacatgagatgattgccaaacccccaggtaggtacgagtgaaaacgaatacaacagatgacacagataaaaggtcccaatgtcaaagagaaaaccagtctttaaaatgtgattctggaagctgtgttccaaaggaaataggtcctgggcagctgtttttttttttttttttttctcccacaaaggggcatcttctgtcttatgcttttaaattctctaagaattctacttctcctttggtgagcttccttcaggttcacagtgagagccaaagtcctcttcatggcatgtaaaaggctgcgcgggctaggagtggtggctcacccctgtactcccagaacagtgggaggccaaggcaggtggatcacgggaggtcagaagttcgtgattagcctgaccaacatggtgaaactccgtttctactaaaaatacaaaaattagctgggcgtggtggtgggcacctgtaatcccagctacttgggaggctgagtcaggagaatcatttgaacctaggaggtggaggttgcagtgagccgagatcatgccatcgcactccagcctgggcaacagagcgagactccatctcacaaaaaaaaaaaaaagagagaatgagaggctgcacagtctggctgcttttccattgttttggggacacacaaatatctgcataattttgagaaactaaaactatttttttaagtcctctttttgcatcaggtctgaaatgcgtgagagtattagtttatcttgcattttttttgtttatttttctgcacagtccattctgtttttatttctataaagtcttcaaatatagattgaaattgtaagtatgatattcttctgctttgttccttttcctcaagactgttttggctattcaaagtttattttagtttcatgtaaattttagaattgaatttccattactgtgaaaaaaatactgcaattttgataggaagtgtattgaatctatagatcactttggataatatggcactttattaatatttattctttcaatccaaagacataaaatattttaaaatttatttggatcttccttttttatttattttttattgtaaaggttttttacatccctggttaatttttttctcagaaatttattatgtaatgctatagtaaataagatttttttctctattttatcagatagtttgttttaagtgtatgaaactgtagctgggcgcagtttaagtgtatggaaccatagctgggggtggtctcccaaagtactagatcacgcctgtaatcctagcactttgggagaccaaagtgcatggatcacctgagatcaggagttcgagaccagcctgaccaacatagagaaaccctgtctctgctgaaattacaaaaattcactgggcatggtggcgcatgcctgtaatcccagcaactcgttaggctgagatgggagaatcgcttaaacctggaaggcagaggtttcagtgagccgagatcaccccattgcacttcaggctgggcaaaagagctagactcctactcaaaaaaaaaaaaaaaaaagtgtatgaaaccatacatatacttatgtatgttaattttatgttttgctaatttactgactgtatttattagtttagacagggtttaatatactgtttatggttttttaaatatgtgattgtatgatctacagacagcaactttttacttactgtttttcaatttcaatggatttttttttatttctttgactaattcttctgccacatacttccagtgctacattaaaatagaagcatcggctgggctccctggctcacacctgtaatcccaacatgttgaaagggcaaggcaggtggatcacctgaggtcaggagttcgagacaagcctgaccaatatgatgaaacctcgtctttactaaaaatacaaaagttagccgggtgtggtgacatgcacctgtaatcccagctccttaggaggctgagacaggagaatcgcttgaatcagggaggcggaggttgcagtgagccaagatcacaccattgcactccagcctgggcaacaagagcgaaactccgtctcaataaaaaaaaaaaaaagaagaagaagaagcattgacaatgggcacaatatagttttgtattggtatctaaatttgatggagcaaacacctcttcaagttttcataaactgattttagaaggtaaagatcttcttttattgggcccttagggtgatgagatattctgtgaatttttagtgaagaggggttgtagcttggtcacaaggctgctgggtctacctttgggtccacctttagttggcttgctacaggggcttgggtagttgtaattccattttatttttagacagaccgaatatccttacaggttcaagcagttctcatgtctcagctttgcaaggagctgggattacagatgtgagtcacggtgtccggccttagtgtaggtttcttaacatcagtttattgtgtcttggttttaatttgtattacaattttagacaatttgcaattctgtttgtacactttaagtcaatttgaggtttaattaagagataaattgctggatgcggtggctcacgcctgtaatcccaacactttgggaggctgaggtgggtggatcaagaggtcaggagttgagaccagcctggccaacatagtgaaaccctgtttccactaaaaatacaaaaaattagctgggcatggtggcgggcacctgtaatcccagctacttgggaggctgaggtaggaaaattgcttgaacctgggaagcagaggttgcaatgagccgagattgcaccattgcactccagcccaggcaacagtgcgagactccgtctcaaaaaaaaaaaaaaagataaattatgcatgtttattacaatcagattacatatgtatgtgtgtttatctataaatatgaccccaattttagttatggcttatcttatattctttcttagctgattttccatggtagttttatcttaagtgagcagtcattgagatagttttattttttccatgtgtttaatgatgaatatatatttccttttgtgagaaaagcacttttgtgatttgaaggtaattttcaaaaggatttataattctgtatttttttctgtttttctttaaaacttgttttaaaaacacataacataaaatttaatgtcttaaatctattgaagtgtacatttcagggccaagtgtggttgtggctctcatctgtaatcccaggattttgcgaggccaaggcaggaggatccctggagcctaaaagtttgagagccgcctggggaatatatggagacctctctctataaaaaaaatttaataatagccaagcatggtggtgtgcacctgtggtcccagctacttgggagattgagagggattcaaaattgtgccactacattgcaggttgggggacagagtgagaccctgtctcaaaaaaaagttgttcatttcaggcatgttaagtatattcacactgttatgcaaaagacttctagaaactttacatcttataaagctaaaacttaattcccattaagtaacaactgctcattttaccctctctccagccctgacagacaaaccttcaactttctgttttatgatttttgactacttatgatacctcatatagctgggtgtggtggcttacacctgtaatcccatcactttgggaggctgaggcaggcagatcacctgagatcgggagtttgagaccagcctgaccaacatggaaaaaccctgtctgtactaaaatacaaaaaaattagccaggcatggtggcgcatgcctataatcccagctcctcgggaggctgagataggaaaatcgcttgaacctgggaggtggaggttgcagtgagccaagatcgggccattgcactccagcctggtcaacaagagtgaaactccatctcaaaaaaaaaaaaaaaaaagatacctcatataagtggaatcatatagtatccataattttgttactggtttaattcaggtgacataatattctcaatcttcatcttaaaatgtgacaagatggttatttttaaggtggaataatattccatcatatgtatatgttacattttttgatatgtttataaatcaagggacatctgggttgcttcagccttttgacttttgtgaatactggtacaataaacatatattttcaaatatgtcttccaggtcctgtgttacatattttgtttcttttgttgtttgttatttttatttttattttttttttgagatcgagtctcccgctgtcacccaggctggagtgtagtcgtgtgatctcagctcactgcaacctctgcctttggggttcaagcgattctcctacctcagcctcccaagttcctgggattacaggtgcacgtaacatcacccatctagtttttgtatttttagtagacatggtgtttcaccatggtggccaggctggttttgaacttctgacctcaggtgatctgcccaccttggcctcccagtgtgctatgattacaggcttgagccactacacttcgcctgtgttatgtattttagatatagatttataaataaggaacatttctaacattttaaaataatggctgcatcattattttccaccagcagtcaacatgggtttcatttttattgcatcatcaacagatttggtgtatcaaaaaaaaattatagtggccattctaatgggtatgaggtgattttgtttgttatgtttcttttttcatttctctacaaattagtaattttgtgtgtgctttcaaatgcattttccaattttgtgtatttttttgagaaaaatttgtccatttctaaatcaagttattcaaatttactgttagttttaagagtcatttatatattttgaatattaactcttttaacaagtaatatgtaaatgttttcaactattttctaagggacgttgtcactcctgaaatttttttctttcagaaattttgaagtatagtgtagttaaacttttttgttcttttatttgttgctcatacatttaatgtcgtacctaaaaaaatggtgccaagaccaatgtcatgtcttttttttgtattctttctttctttctttctttctttctttctttctttctttctttctttctttctttctttctttctttctttctctttcttttctttctttctttctttctttctttctttctttctttctttctttctttctttcttcctttcttttctttcttttctttcttttctttcttttctttctttcttttcttagatggagtcttgctctgtcccccaggctggagttcagtagcgcaatctcagctcactgcaagctctgccttctgggttcacgccattctcctgcctcagcctcccaagtagctgggactatgggcgcccgccaccatgcccggctaagttttttgtatttttaatagagacggggtttcaccatgttagccaggatggtctcgatctcctgacctcatgatccgtccgcctcggcctcccaaagtgctgggattacaggcatcagccaccgtgcccggcttgttttgtattttttctaaaatatttgttagtttattttgtctaagtattttatttaaaatgtatttttgtatcattcaaggaaataatccaactttattttatcagtgttgatactgtagcttttaactgttgtattgacatctttgaacaatgaaattttttgacccctgagcaagaatgttgaagtgtgttttatattcacatgcttttgaatttgccatttgacttttgcttttaattcctaatttcattcagtttttgttagaaaacacacagtgtataattttagtcttttaaaattgttttgttgttgttgttttgagacaagatcttaccgtcatccaggctggagtgcagtagcataattttggctcactgtagcctcagtctcctgggctcaagtgattctttcacatcagtttcctgagtagctaggattacagacatgcactaccatgtctggctaattgtgtgcttgtttgtagtgttaggatgtcaatgtgttgcccaggctggtttcaaacttttggccccaggggatcctgttttcttggtctcctaaaatgttaggattataggcaagagccactgttcccagtattttaaaatttaataaaacttgctctgtgtcctaacagaatacaccagatgcaaataagaatattgtgtattatcttggttttgactggagagttttgcatgtgtctgtgaagcctagttggtctataatatgggttggatattcatgttgtccaaacctcatgctgcaatataaatcctcaatgttggttatgggacctggtgggacacgtttggatcatggggcaaatttctcatgaatggcttggtatatcctcttggtaaccaaaaacttttcactctattaattcaaatgagagctggttcattaaaagaacctgggtccttcacctcacacttgctctgtctcttaccatataacatgtccagttactctttaccttccaccatgattttaagcttcctgaaatcctcaccagaagcagatgctggcacacacttcttatacagtctgccaaactgtgagccaaataaaccttttttctttataaattatgctactctcaagtattcctctatatgcaaaataattaatattgtctataatgttagctaagtttttttcttattttttatctgaattttatatttattactgcaaatggagtcttgatgtctacaattattatgttgccatgtatgtcttgcttcacttttgtcaatagttgctttatatattttggagccctgatgttatatacacacatttatatagatagataaatattacgattatagattcctgctaaatcaactcactttactataaaataataccagtctatgtctcatggtagtatttgacttaaggcatattatgtctaatataattatgaccacatcactcaattgtggttactattttcatggaatatacatttttttttcattttttattttcagcctatttgactcaatgcaaaatgagtctcttgtaggcagcgtactgtatgctttttaaaaaccactcaggcattctatttttttatatataattttatttatttatttattttcttttgtgatggaatttcactcttgttgctcaggctgaagtgctatggtgcgatctcagctcactgcaacctatgcttcccgggttcaagcaattttcctgcgtcagccttctgagtagctgggattaaaggcatctgctaccacacctggctaatttttttgtatttttactagtgacagggttccaccatgatggccgggctggttttgaatgcctgacctcaggtgatctatatattgtccttcttcgtctttttgaagttttgacttaaagtacattttataaaatatgacagtttttgactttaagatgtagcttgtgtaatattattttgacctcttctgctctcatttggttaatatttacatgaaatttctacttctgtcttgccactttcagtctttgtcattagatctcaggtgactcttgtagaaaggcaagttggatcttgatttttaattttttttttttttttttttttagaagaagtctcactctgccactcagactgcagtgcacttgttcaagtgattctcctgtctcagcctcctgagtagctgggattacaggcatgccccaccacgcctggctaatttttgtatttttagtagagatggggtttcaccatgttgatcaggctgataaaattttttaataaacctttttattgaaagtatgtttcttgactggaaagataattatatatatttaaatagttttccgaaagagaaaaacttactaatgttatctatttatttatttatttattttgagacggaatcttggtctatcactcaggctggagtgaaatggcacaatgttggctcactgcaacctctgcctctaaggttcaagtaattctcctgtctcagcctcctgagtagctggtattataggcacccaccaccatgctggctaatttttggtatttttagtagagatggggttactccatgttggccacgctggtcttggactcctgacctccagtgattcacccgccttggtctcccaatgtgctgggattacaggcgtgagcgactgcgcctggccaacgttattttattgttttatttgattcttttatctttgtctctttttctctttctgtctttttgtgttttttttttatttttgtattgatatgcttttaatttttttcttattttcttttgtgtatctaggcaggtagtttcttagtggtatctaggggattacataaaacctctaaaagatccaacaatatactttaatgcagtaaaaaattaacttcagttgcatgcaaacattcttcattacatctgccttcaactttgttattgattttgctaattctacttatgttatatattcattaacagatgtttataataattcctctacttccatcttttgcattttagagaataactaaaagtgctttctgtgccattatgataataagtaaggaattctatttttgtgtatgtgcatatcttctccagaaagttatgtattttcatatgatcatgtgttgttttcttgtattatgttattttcagtggaagaaacttctttcagcatctttgataggtagggcatatgcagtgccaatatactttcttaggatttggttattttggaaggactcctttttatatgatagtacaattttgccgatggtattattttctgcaaaaattttttttgataaattcactggttatcttataagactatgcttataaatgacacatcatttttatcttgcagcacccaaaattcttttcttatctgtgatttttgaaattttgcttataggtgtgtttgtgataaatatctttttgtgtatcctagtttgttcagcttcttcatgtttacattattttttcttttaagaaatttttaagttatttttatattttttatatccataatttttgtttttttctattttaatattttttcttgtttatcctcatttttctgatcttcagtagtcgtctgtgttcctatttcacttactgaatatcattcaatttcttttatgtaattaattaatttatttattttctgagacagagtctcactctgttgcccaggctagagtgcagtggcatgatcttggctcactgtaacctacccctcccaggttcaagtgagtctcctgcctcagcctcccagtagctgggattacaggtgcatgctgccacatttggctgatttttgtatttttagtagagataggctttcactctgttggccaggctgatcttgaactcctgacctcaaatgatccacccaccccagcctcccaaagtgctgggattacaggcatgagccactgttcctgtcctactttattttttttttgagacaggcttgctctgttgcccagcctggccagcagtggtacagtcactcactgcaagcttcccatcttgggttcaagcagttctcgtgtgtcagtctcctacgtggctgggattacaggcacatgccaccacgcccagctaatttttgtatttttagtagttacagggtttcaccatgttggccaggctggtctcaaactcctgacctcatgtgattttcctaccttggcttcccaatgtgttagaattacaggaatgagcttccaagcttggcctgttcaatttattctgaattttaaaaattactttattcactttttatggctgcttttgaaaattttataatttttttgatgggccatgctgcccaaatattttgtatacattgtaatctttgagtgagattcaggcattaacaaaaagctacctgtgccaatctttataatatagttttgtccttgtgtagtctgaaatcaattgttttggctagagattctgggaatttctcaaacatgtttttaggatgtgtcttgtctaaaattttgtgtttattgtttagttaaatcggcttattcatatttcttcctaataatcagtaatcacttgctacagccattcctgtttggattactgcagtttctctgcttctgtaacatttacctttagactcagcagactcaaactgtcattctaacatatcactgtttcagcattttatgtcatgggagacattagccggtgtctaaaaaagttcatagatgccagaaataaagatgtatgtgccaatatttttcttatttttaaaaaagaaaccaggagttggcaatttatatttgtgtgtgtgtgtgtgtgtgtgtgtgtgtgtgtgtgtgtgtgtgacagagtctcactctcttacctaggctggagtgcagtggcaaaaatcttagctcactacaatctccgtctccacagttgaagcaattctcctgcctcagccttcaggtagctaggattacaggtacctgttaccatgcctggctaattttctgtatttttagttgagatggggtttcaccatgttggtcaggctggtctcagtctcctcaccttaggtgatccacctgccttgccttaccaaagtgctggggttacaggcattagccatcatgcctggccaacaatttaatttttttttttttttttttttttttttgagatggcgtctcactctgttgcccaggctggagtgcagtggtgcaatcttggctcactgcagtctttgcctccctggttcaagcaattctctgccgcagccctccgagtagctgggattaaatgtgcccgccaccatgtctggctaattttttgtatttttagtagagacaaggtttcaccatcttggccaggctggtcttgaactcccgacctcatgatccacccacctcagcctcccaaagtgctgtgattacaggcgtgagccaccatgcccaactggcaatttacttttaaaagcacaatgttatactgggcagcaggaagagctgtgttgggtataactaacagagctttctttttcttctatgtggctatttgcattctgctcacctggagcccttcacacacttaactcatttataaattttttacaattttatttttgtcactatgtttttgttacatttatgtgtccaggaagaaatcagaactggtggtattttgctatgtcatcttgcttatgtagtttgtataattttataggttagatttgtaatgtatatttatctgagtctagcaattgaagtaatgtgtttttattgtttcttttagttatgagttctcattttgcccaagacctttggccagagaacatacaaaattctttccaaatagggatgctgagaagatatgaagaatgcagacatgacaatttacagttaaaaaaaggctgtaaaagcgtgggtgagcataaggtgcacaaaggaggttataatggacttaaccaatgtttgacaactacccagaaagaaatatttcaatgtgataaatatggaaaagtctttcataagttttcaaattcaaacacatataagacaagacatactggaataaatcttttcaaatgtataatatgtggcaaagcttttaaacggtcctcaacccttactacacataagaaaattcatactggagagaaaccttacagatgtgaagaatgtggcaaagcttttaaccaatctgcaaaccttactacacataagagaattcataccggagagaaaccctacagatgtgaagaatgtggcaaagcctttaagcagtcctcaaaccttactacacataagaaaattcatactggagagaaaccctacaaatgtgaagaatgtggcaaagccttcaaccgatccacagaccttactacacataagatagttcatactggagagaaaccctacaaatgtgaagaatgtggcaaagcctttaagcacccctcacacgttaccacacataagaaaattcatactagagggaaaccctacaactgtgaagaatgtggcaaatcctttaagcactgctctaaccttactatacataagagaattcatacaggagagaaaccctacaaatgtgaagaatgtggcaaagcctttcacctatcctcacaccttactacacataagatacttcatactggagagaaaccctacagatgtagagaatgtggcaaagcttttaaccattccacaacccttttttcacatgagaaaattcatactggagagaaaccctacaaatgtgatgaatgtggcaaaacctttacctggccctcaatcctctccaaacataaaagaactcatactggagagaaaccctacaaatgtgaagaatgtggcaaatcctttactgcatcctcaactctaactacacataagagaattcatactggagagaaaccttacaaatgtgaagaatgtggcaaagcttttaactggtcctcagaccttaataaacataagaaaattcatattgaacgaaaaccctacatagtgaagaatgtgacagatcttttaaatgttcctccacttttaattagcataagataattcatactggagagaaaccctatgaatgtgatgaatgtgggaaagcctttaaccagccctcgactcttagtaaatttgagagtttatatggaacacaaaccctacaaatataaagaatgtgacaaagctttttaaggaagttctcaacccttattacacataattcataccaaacagaagccctacaagtgtgaagaatgtggcaaaacctataaacctataacaagttctcaattcctttttttttgagatggagtttcactcttgtcaccgaggctggagtgcaatgacatgatctccgttcactgcaatctctgcctcctgggtttaagccattcttctgcctcagcctcccaagtagctgggattacaggtgcccaacaccacgcctggctaatttttggatttttagtagagatggggtttcacaatgttggccaggctggtctcgaactcctgacctcaggtgatccacctgccttggccttccaaagtgctggggttacaggcgtgagccaccatgcctggctacaagttcttaattcttaagagacaccatgcctggctacaagttcttaattcttaagagacatggcgataattcatgctgaagaggaaatctggaaacctgaaagatgcgacattgcttttaccaacacctccacatttcctatacataaaaataaattatactagtgtaataccctagaaatgtataaaatgtgacaaagcctttatatgattgtcatacatgattgtaggtgatagaagtcatactgccaaaactcctgtaagtgtgaagaatgtggcaaaatattttattagtgcttataccttatttcacaggaaagctcttatccttgagaaaaattgtgcaaatacaaagaatatggaaaaaccattaatgcctactcacatcttactgaacagaagaaggttcatagttaataaagcattaaaagtgcaattactgtcaaaaaatctttcagaaaatagaagtctttaaagtgaagaatatttattctgaagacagccattacaaatataaagggggttgtagtgcctttacttgtgtcacagatcttagtgcacacatgtagtactagaggaaaaccctgaagcagttgctcaagctttgtttcagggaatcaagggaatttatattgagaatagtactgcaaatgtaatgaatggaaagacttttcttttccaaaaatgacagcttagaaaacaccagagggtttataccaaaatatatttttgcagatgcagtaaatatcaaaaaatatttaattcaaaattgattctatgtaaatatcagagaattttccatagaataattaaggcactgacacttcagacattacactaaatcagaatgttcagtataaaaactaatccacagctacagctgttagataaattatttctatataattttttaaaaagtggatttttgaagcactgtaattacattgaaagtatacttgttttcttgaaaaaatttttttgaaaagtgaataatgatataatacagctttcacattgctttatgctattttattcctattatattcacatgtgaaagcatgtgatcaattgttgctgcattagagatattagagattgttttttattagttgggcattatgtatgaccttttctataaaagagtaaggacattaaaatgtaagatgcatgatgaaaatataagtggagaggctctttgtagttaactgatattaagtaatgtgtaaggtgggggttcatgttctcatttctataatcctagccaatgacttaatgttgatgctttgaatgtcttttggatggtctaacctacattaacatgtatgcggaacatcttaaaactttttttcaaaaatcataatgaattattttattaataagcaaagataaaaaataaggtggggtttcagagtaatgcttttctacattatagtgacagaaagaaattattaattatagttaaaaatattaaaatacagccaggtatatttattggtttagacaggttttaatataatatttatggttctttaaatataaagttgtatgggatgggtgcagtggctcatgcctgtaatcctagcactttgggaggctgaggcagatggatcacttgaggtcaggagatcgagaccagcctgaccaacactgagaaaccccacctctactaaaaatacaaaaattagctgggcatgatggcacatgcctgtaatcccagctattcaggaggctgaggcaagagaattgcttgaacgtgggagttctcagattacaggtgtgcgccaccatgcctggttaatttttgtatttttagtagagacggggtttcaccatgttggccaggctggtcccatactcctgacctgaagtgattcgcccacctcggcctcccaaagtgctgggattacaggcataagccaccgcaccctgcctatttttttcttactgaaatttattattagtatttgtgggtatattgtatgtgtatatatttatgccttatatggtatattttgattcaggcatacaatatgtagaaatttcattagggtaaataagatatccgtcacctctagcgtttatcatttgtattacaaacagtgtaattatacacttttagtgcataatttaatgaagcaggtggattgcctgaggtcaggagttcaagatcagcctggccaatatggtgaaaccccgtctctactaaaaatacaaaaattagctggacgtggtcgtgcatgcctggaggctgaggcaggagaattgcttgaaccctggagggacagttttttaaataagattaaggactgaggactggttggggctcataaatgatatgagtaaagtgttagctaaaacagaagaaaaaggggtgcccaaacaagtcaccttaaaatttgatgcctgtgctgtcattaatagtaataagttaggaataaggtgtggttctcttaattagaaaagaggctatatggcagaaaataaatacaactgtcataaattagcactgtgtggaaataaatgtgaacactggtcttgtgtcatttaggccacttggattaaaaaaaaaaatgaaaaagatccatcccaccttcagaaaggaaaaaatggcccttcctgtactcagggacaatgtaaccccttagagctagtcataaccaatccccttgatcctcgctagaaaaaaagaggagcatgtgaccttaggaatcgacggggccagactggatccttgagtaaatatcttggttcgagaagcttacaaagactctcctgagccagtgtttcaaactttctatgatgaactaaatgtgccagtaccagaaattccaggaaaaacaagaaatttgtttttgcaattagccaagcatgtagcccagtctctcaatgtcacttcatgttatgtatgtggagaagctgtaataagagatcaatggccatgggaagcctgagaattagtacctacagtacctgatgaattcctggctcaaaagaatcaccctgataatttctgatcctaaaagcctcaattattaaacaatattgcatagctagagaaggaaaagaattcactcaccgcgtaggatgacttagttgtcggagacagaaactgtataatggtaccacaaaaacaatcacttggtggagttcaaatcacacagagagaaaatttagtaaattctcaaagttgcaaactggacccacctggagtcccaccgggactggacagcccccactggattatactggatatgtaggcatagagcttatgacagattactgaccagtaggcaggtagttgtgttattggcactattaaaccatctttcttcctactgcccataaaaacaggcaaactccttggcttccctgtctacgcttcccgcgaaaagagaatcatagctataagaaattgaaaaaatgataaatggccccctgagagaatcatacaatattataggcctgctacttaggcacaagatggctcatggggataccggacccccatttacatgatcaaccgaatcatatggttacaagctgtcttaaaaataatcactaataaaaccagcagagccttgactattctggcctggcaagaaactcagatgagaaatgctatatatcaaaatagattagccctcgactacttgccagcagctgaatgaggggtctgcaggaaatttaaccttactaattgctgcctacacatagataatcaagggccagttgttgaagacatagttagagatatgacaaaactggcacacgtgcccatgcaagtgtggcatggatttgatcctggggccatgtttagaaaatggttcccagcgctaagaggatttaaaactcttataataaaagttataatagtaataggaatctgcttactgctcccttgtttgctacctgtacttcttcagatgataaaaagcttcattgttaccttggttcaccaaaatgcttcagcacaagtgtaatatatgaatcactatcgatctgtcttgcaagaaaacataggtagtaaaaataaaagtgagaactcccactattgagagtctcaaagtgggggaataagggaggagaccacccctcatattgtcttatgcccaatttctgcttccaaagaaagaaaaagtaaaaactaaaaggcagaaatgaaatccacaagcagacagcccagcgccacaccctgggcctggtagttaaagatcaacccctgacctaatcggttatgttatctacagattacagacattgtatagaaatgcactgtgaaaatccctatcctgttttgttctaatctaactaccggtgcatgcagcccccagtcatgtaccccctgcttgctcaatcaatcatgaccctctcacacacatccccttagagttgtgaacctttaaaagggacaggaattgctcacttggggagctcagctcttgagacaggagtcttgccaatgcccctggctgaataaaccccttccttctttaactcggtgtctgaggagttttgtctgtggctcgtcctgctacaccctctccagaatcatgggccatagttccaggggagaacccttccaaactaaagctaagaaaatttacctatcttccatctgttctgttactccttctccttttccccttctattgctaatcctctcgttattaatgtaactaggttgggctcaccccaaactatttcctttagtgcttgcctcattatgccctgtgaaaatctccagagtcaaaaacagctctcagcctcagagaaatatctctgtcacttttggacaagaggctccccctaacacgactcctgttctttaacaaatgtaaaaaaaacaggcctgccacagctggaatgatgttttataaacaatcgaatatcagggctggacctcatcaacaagtggttgtatgtccttaaagccatatatttgctttgctaaaggaaacactccttccaattgccagtttaaccaatgtaatctggtgcaaatttctattctcacccccacttctatggatcctaaccccactttgatttgagctgcttctatggcataagacccaacttggctggcacaaatctcatagggtctttcaaaatgcgtctaatcatccctcatgctcttcactcccctctcttctaagctcttttctaaccagactgtcatatcttctatgcccagtgataagactaaaatagatattgtaaaagtaactaatttaaggcaaactttaacaattaaaacaagataccaagatacaaatgcctggttaaaatggatcaaatattctgtgcacacattaagcaaaagcaattgttatgcttgtgcacgcggccagccagaggcccaaattgtccctttcccactcagatggtcttctagttgaccaggcataaactgtatagtagctcttttccaagaccccacagcctagggtaataaatcctgctgagctctctctctgctatttcttaaagtccaacaccctgtgggtcaggccccaagagccatccagcctccatctcctagcgtcaattttacctcgtgtctctcacgacaaggggaaaacttggcatttcttggagacttaatgggatacagtgagcttaagcctttccaagatcttaccagtcagtcttcccttgttcatctttgagcaaatatatggtggtattgtggtggacccttactggacactctgccaagtaactggaacggcacttgcactgttgtccagttggctatccctttcactctggcatttcatcgactagaaaaagaaaaaccacaacactgtaaaataagagaagccccttatgtgtcttttgactttcaagtttatttagacacaactggagtcccacgggtggtacctgatgaattcaaagcccaagatcaaatagctgcaggatttaaatcaatatttccacgggtaactattaataaaaatgtagattagatagataaatcacatctattataatcaatattagtttattaattacaccagaaatgctgtcaaagaaatagccaaccaattaaggcctactagccagataacttagaaaaacaaaatggccctggacataatattagctgaaaaaggtggagtttgtgttatgattaaaactcaaatgttgtaccttcatcccaaacaatactgcccccaataggaacataagaagggccttacacgaacttaccactttatccaatgaattagctaaaaattctggggtcaataacacgttttcagaatggctagagaggtggttcagtaaacgaaaaaaagtcatagcctcaattcttacttctcttatagttgtaataggtgtactaattcttgttgggtgttgtgtcataccatgcatctgtgggctagtacaaagacttataaaaacgacacttacgaaaacctcccttagttctcctccaccttattcagataaacttttccttttaaaagatcaagtcaaacaacaaagtaaaggtatgtttaaaaagttttaaaaagcgtgtggtcgcagtggctcacgcctgtaatcccagcactttgagaggctgatgcgggcggatcacccgaggtcagaagttagagaccagcctgaccaatatgaagaagccccatctatactaaagacacaaaattagctggtcgtggtggcacatgcctgtactcccagctactcgggaggctgaggcaggagaattgcttgaacctgggaggcaaatgttgtagtgagccaaaatcgtgccattgcactccagcctaggcagcaagagcaaaaactccatctcaaaaaaaaaggtttttttttaattataaaaattaaaagggggaaattgtaaaatacaataaaattcctcttcaaaggtttagtcttaactttcttgttctttgttctcaaactcaacttgcttgttctccatgcctccttgcccctagttactgtaacaaccttccttcccaacagctctaatcaataattcacatctgttcccttgattactcactctgcagccttcccacccttcaaaaccacacgtcccaccactgtgacttatacatgccccttcccttccttatttggaaaaatatttacaaatagccaatcgggtcagtttagattgtggggtccgaccctagcccatgggggagtaacacagaggaagagactttacgttaaaaataaaaaccccttccctcctttgttcagggtgctcttgcgatcgtgattaatgcaaacaaaaaccttttgcagaagtaaattgccttactaaaaaaacttttgcctgagtactggtttcactttgcgacaccaaacactttacttccaacggtattattaatatgacaacgaaatacttctgttcaccttttcaatacattcaaaaagagagagtaaaaaagagaatgttcccatgctctggggtggacgtggctcagctcagagaggaagccctggctgaaaaggctgcagcttaggctgttactcttcttcactcagcccagcatgtgatcacatcttctgtcactcaggtcctgagggggcgggaccttaagaattatccaatcagggacgctgggctggaaacgtccaatcaggcaagcagccggaccgaacagggcggcttctggtttggcgggtcctttgtctctcggtgcagccggagctccaggtctcctcttcactactctgtgtcctgtgctcctacaggcccagcctctgtggccctgtgacctgcaggtattgggagatccacagctaagacaccaggacccctggaagcctagaaatggtgagagtgccggtccgacatcccaagcgacggggaggggctggttggaaccggtggaaagtgacggtggcgggactcaggtatccccttagtcagctccacaatctgcgccggagttcttgcccagctcggcctcggttcccttcagccataagatggcggctgcgcttatagcgcagcccccaggcgtcctgtctcttcactgtgcggtgactgtgccctggcttggagccctcgctgggcagctgcgcacccgcagagccgcttctctcccagattgtgcagagaccacgggagagtcgtcaggggagaatcctgactcggagtgcgggttcacgaatgggaagagctttagtgggttgggttcacagtttctcttttctcctattaaaaatttatggggctgggcaaggtggctcactcctgtaatcgcagcagtttgggaggccgaggcgggcggatcacttgaggagttgttagggcagctaagttcctcttcagagactcaacttcctggtcataagttgtaaaaattgtaaatcaaccctaccccttctttttccccattctccttttctcaaaacatcgcgcgtttaccctatatggaaaaagtttgtgtctagcccaaccaggatcagcttagattgtgcggtgggacctcagccaatatgggaaggacacaaaaaccggaactgcgttagggttaaatccccttcctggcccagcgcggtggctgatgcctgtaatcccagcactttgtgaggccgtggcgggtggatcacaaggtcaggagttctaggccagcctggccaacatagtgaaaccccgtctctactaaaaatacaaaaattagccgggattggtggcaggcgtctgtaatcccagctacttgggaggctgacgcacgagaattgcttgaacctgggaggcgaggtgcagtgagccgagagcttgccattgtactccagccttggtgacaaagtgagactccgtcttaaaaaaaaaatagacatcttaaaatttccttcccttatgtaaatactgtgtttgagtaatttcacggatttttcaaacactgagtttcaaaaaccaagtgaataactctgacatgacaaagcttgagcctagtgactccaagctaaggctaatattaagcctaaaacagaaggttttttttttggacagagttttgcgttttgctcttgttgcccaggtggagtacagtggcgcaatcatggctcactgaaatctccacctcctgggttcaagcgattctcctgcctcagcctctcaagtagctgggattacaggcatgcaccatcatgcttggctgattttgtgtttttagtagagacgggttttctccatgttggtcaggctggtctcgagctcccggcctctggtgatctgcctgccttggcctcctgaagtgctgggattacaggcatgagccacagggcccagccaacaggagtttataaagtcctatttagctttttctggggagcctcccctgcagatgtcccagcctattcaccggagccatggaaggaggcgttattctgagagaaggtacagagccccagaaagctggggccccacaagcagatgcagttaaggttaagatgaaaggaaactgggaggatcttttttttttttttttgagatggagtctcgctctgtcgcccaggctggagtgcagtggtgcgatctcgactcactgcaagctccgcctcccgggttcacgccattctcctgcctgagcctcccgagtagctgggactacaggcacccaccaccacgcccggctaattaaaaaaaatttttttaatagagacggggtttcaccgtgtgagccaggatggtctcgatctcatgacctcatggtccacccgcctcggcctcccaaagtgctgggattacaggcgtgagccaccgcgcccggcctttgggaggatcttactgacgatgaagttgttattgttttgaggaacattttagactttgtaaaataaaaacgttaatttatgtaaaagatgaatttcaaaaaagtattacaacaggaggaagtaccaactaactctaaaatctttatggcttgcaaaaatgtaggcagaaaagggcttttctccctagggaggagcaaacaagattagaaaggaggtgggaggggaatggcaaatggagggtgaaaaagtcagattttacatcagagaatgtcttaccctgaaatcagcatgttcttaggagggatgtaaagtggggctgtatgttgactcagagtgagggtagctcaaagttcaggagcctgaggaagggagataaacctaagtaaagtttgattaggaaatattttattttaggcctggcccggtggcttatgcctttgggaggccagcactgggattaccagtgctggtaatcccagcactttgggaggccaaggcggacaggtcacgaggtcaggagatcgagaccatcctggccaacgtggtgaaactccatcgttactaaaaatacaaaaattaactcagcatgttggcgcccacctgtattcccagctactcaggaggctgaggcaggagaatcgctagaacccgagaagcagaggttgcagtgagccagatcaagccacagcactccagcttggcgacagagcaagactctgaaaacaaacaaacagaaaaaaatatttcaggccaggcgcggtggctcacacctgtaatccgagcactgtgggaggcagaggcaggcggatcacctgaggttaggagttcaagaccagcctggccaacgtggtggaaccctgtgtgtactacaaatacaaaaactaggcgggcgcttgtaatcctagaaacttgggaggctgaggcaggagaattgcttgaaccctgcaggcagaggttgcagtgaaccgagattgcgccgctgcactccagcctgggcaacagagcgagattctggctggaaaaaaaaaaaaaaaaagaaatattttattttgaccaccgaagacaaatacagctgatttttttttttttgaatgagaaataggagaaaatgtgcagagtgtgtgtctggctgtgtgataggtaagaaaagagagcactaagtcataagggaaagagtttttctataaactgtttctggagcacacaaaggacggagaattgtattaatcacaaatattttccaggattatctatgtgtttcatctttccccatctcttttctttgttctatgcatttcttccttttggcttttcctgggctgcatcttatatatgaaaccagtaaacataactacagtgttttgctgagttctgtgagtagctctaccaaattgttgagtttcgtggaggtgataggagtccccagtttttaaacagcagctcagaagcatagatgggcccatggggtttgtgtctggcatctgcagtgaggacaatgttgtggaactgagccctgaatcagggtctgtgctgtgtgtggtgtcagaattcaaatgttagacaatgagttggtgttggagaattgtttgatgttcagcaaactacagatttggtgccagaaaaaggatatcatggagccctagcctggaataaaactctgggtgtttgggaatgggagtctctgctctcctctacacaggctgtcacgctgcccattgtcctgaaattccaggtcttctcccagggtgagagatgactgaaaacttagagaaaatgagctctgatgacagactcccttttctcacagctgccaccacaggattcccacccactcacaaaaacacacacactagacattgacatgtccacacttctcccagaactatgcactaccctcaggaacctcaccgtggcatttttgatctgtgtttttttcaaagaattcacaagtgtctacaagtctcctggcatatccccacccccagacactgaatctgcagcagcaacctgttttctccaccaacctagggtctggaccacctgttcataatctcacctgcctgcattcgcacggaaacaaatcagggtacagccccacttgggccactatctgtagcaaaaatcagtcctttcacctacattgtgctctctctcactcagggatttttttttttcttttagcttttatttttggtttgaggtacccatgtgggtttgttatacagctgaaattatgttatggggatttggtgtgcagattattttttcactgaggtactaaacatagcaccaaacaggtatattttctgatcctcttactcctcccaccctccaccctcaactaggcctcagtgtctgttgtttttctctttgtgtttatgggttcttattatttagctctcccttgtaaataacaacatgcatttggttttctatttctgcattagttttctaagaataatggtctccagcttcatcaaagttattgcaaagaacatgatttttttttaaatggccacagagtattccatgatgtttatgttccatattttgtttttgctaaatcttttatttttggtctcacttatggcccaggctagagtgccatggcatgctattggcttactttagcctcagcctcccaggctcaaggaattctctcctacctcatcctcccaagtagctgaaactacacatatgcattaccacacctggccaattttttttttttccgtggagacagaattttgccatgttgccaggctggtctcaaacttctgagctcaggcaatccaccagcctcagcctcccaaagtgctgggattacaggcatgagccaccgcatctgaccatactgtattttctttattcattctaccattgataggcatttatggcctgtccatgtctttgctgttgtgagtagtgctgcaatgaacatgaatgtggatgtgtctttataatataataatttatatttcttcggcctgacagggtatatacccaattataaggtttctgggtcaaatgataattctgttactagttctgtgaggaatcgccacactgctttttacagttgttgaactaatttacactcccaccagcggagtataagcatctcctttctcctttctctgcaccttgccagtatctgttaccttttgactttttaaaaatagccattctgactggtgtgcggtggtatctcattgtggtttttctttaatttctgtaatgattagtgatgaacttttttttcatatgcttgttagtcacatgtatgcctgcttttgaaaagcatctgttcatggttatttttgcctactttttaatgaggttgtttggttattcttgtaaaattgtttaagttcttaataaattctggatattagacctttgtcagagacaaagtttgcaaatgttttcctttatttggtaggttgtctgtttactcagtttcttttgctgtgaaaacctctttagtttaaataggtcccatttgtcaatttttgcttttgttacagttgcttttcgtagcttcatcatgaagtctttgccggtttctgtgtctagaatggtatttcctagttatctttcagggtttcttataattttaagtttttcatttaagtgtttaatttgtcctgagttgatttttgtatatgatgtaatgaaggggtccagtttcagtcttctatatagtgctaggtagttatttgagcaccatttatgaaataagtaattcttcccacatttctcttgtcagctttggcaaaaatctgatggttgtaggagggtgtcattatttctgggctctctattctgtcggtcttgtgcactcatggatttttttataacatctttttctcttctgctttttcccccataaagattctttcaggtgcatctagtgtgcaaaattgaggtgtccaagagttcaaaaattctttaaaaagttcccaaaaaaattttgctattctctcttctctttagggatttagattatatatagatgttttttctgctttttaaaacatatatgtaaatcatactaacagctaaataaactttttgtaattttttctgaccccagattgtctttatctagtacttcagatttattgctttgttttggcttctgaaaagtttattttttccatttttagtccttcaaagtagacacagatttgtttagataaaagctcattttaggagcacacagaagcttagcacaaaaataggattaaatttagcaataccgaatgataaagactaaaagatactaagttccattgacagaaacctgattattcaagttaattatcaaatatttgcaggctgaagtgcttatactgcaaaagcaaaaacagttcagtgtgtaaactgaacagtggagtctgtagttgtgccttgctttctatttattacttcagaacaattagcatagttatgtgtagtatttgcagacaacctgcattcatataaatttaacagcattttcttttctttttttttttttttgagacagagtctcactctgttgcccaggctgcagtgcagtggcatgatctcagctcactgcaactgctgcctcctgggttcaagtgattctcctgcctcagcctcccgagtaactggcatgcatcaccacacctggctaagcttttgtatttttagcagagatggagtcttaccacgttcgccagcttgatcttgaactcctgacctcaggtgattcacccaccacagcctcccaaagtgctggaattacaggtgtgagccataaacagtatattctacaatagtatgaatataaagctgcaatacttactttgaatgaatcacttaaatggttattttaatattgttatttatacttttgaaatataaagtgtttgaagtatagttgcaatttttttaaatgctacatacattactactggtacattaaaatattcatacttatttatatctaatatccaaagaaaatttactaccaaagtgttacagttagtctgacatgtttgttactttattcaatggggatcattatgggtaaacacaattttagtatcttttgtttcactaaattggaacgctgctattacaggacaaataaagacaggtgatgtggccaccaaaaaccataatagctcttcagttaactatgttacaaggtctaatatgttccactgtatgaacacagtcagattctatttcttcatcaaaaagtgttgttggaagttgacagatgatttccatatagaacccccattcaatggctagaaaatgagactgcagcagagatggaaaagaaactttataaaatttttctgaaaatctgccctctttcttcataatgctcatgtttctcatactgagagtagctgtgcactttgggtgtttagaaataaattgcttttaggggcgtattttctggctgatgatcaatcttatatctaatctgagctttttcttgagatctttttaccttttttctttcaaaataatcttgctggccgggcgcagtggctcacgcctctaatcccagcactttgggaggccgaggtgggcagatcacctgaggtcaggagttcgagaccagcctgaccaacatggagaaaccccttctttactaaaaatacaaaaattagccaggcatggtggcacatgcctgtaatcccagctactccagaggctgaggcaggaggatggcttgaacccaggaggcggaggttgctgtgagccgagatcgcaccattgcactctagcctgggcaacaagagtgaaactccgtctcaaaaaaaaaaaaaaaaaaaaaaaaaatcttgctcagatggagatttggttttctctctaatgctttgggtgtctgtttcagaaatcctattagtatcccgtggtgtctgaatgaggtgggctgtcacagtgagaacttttgaagatatgtctatctggactcatgctgaaaattcagaagtattttttccatgtcatcattataagtagaaactgaggctgaaacactgctcacattctgattattgtgaaggtgaaattctatccatgacgcctgcaggctctcctcctgcagctcagacgtcactctctgatgtgacactagagtgctgctgtggcaaatggggttcacataaaatgtaagctgtgctctgggctgtgcctcagtggcagatggtagcggtaaagagaggacactagcaactaggagaaagtaaacaggagtgctgtagcccagtgccagggagtacagagccactgctctaaaatgtaaatagccaaaaagaacactattcagccatttttgtagcagagtgaaagcctagcttcagcagacacctggcttcaagctgctaaaccaactcctgttatgaagatgtgaaaagtttatttgtcattgaatataagcaattagtatacacagatggcctcttcagtatccaggtgaatttaggatgaactatatatgacatggtgctgaaaattcttctacttgtggactaattatgatgaccatctttctgactttgcagtctcttaagcagattgatgatgatgtatgtcacattcaagtttaattgtgtaataagaccattttctttctgttctattattgtggagtttctctgaaaatagagaaaatttttcttttaattattgtttccacagagtgtctagaattaccagacatgatataaacacataaggtgccaaccagaatttactgtagaggggactttccctctcagactttgagtcagcccatacttgcgcagcaaaatgcatgctgtccattaaatatgcacgtggaattttgtctctgcctatttggtattgatagttcctctactgtcacttctagagaggctagacccaatttctacaaacttcacagggcagcaattaattaatcatttaacctttttcagtgactcttgtatcttcagatttgaaactgattcagaaactatggagcccagaaacccaatcagagtaacatgtgtgtgctgagtagacatagagacatgagaatctccactttccccttcctcctcttgctaaatgctcacaaatgtacaggtaaacacctgtggctactccagtcgttcaggccctaaacttgaagctccaaattttgaatccaggtcttgagatttgggggaaaaaaaaacttacctaagaaatgcaagtccctttggttatcaaactcagacattaaaatgaaagtactgttatgtctttctcccccctttgaactatgtattcatctcttgaaactgttcactattgccacaagtaattataaattaaactaataatgccacattagacactatatcccataccctaaaccataataatatatatgtaatcaataatcgatgttatttctgtaaataaataaaaatttctgacaatcaactttgtatcagcccactctctgtccctgtcttgttgtctttacaaattgtcttgtaactgctggtaatcaaaatgcagattccaggcaacttgaatctttgctcccaggttataatccttaagcttgacccaagtaaactatctacttatattcatgttctttcagcttttttttttttttttcatgtagacttaccatttagaatgtgctagagtagtctctatgaggggatctctcctttgattgtattccacttgctgtaacaccaaaggatgcagagccaggtggatcctacctggaatctgcagataaggtctggcctctgcctgggatttacaagaaaggaccagaacttggattgagaatgtacagaaaatgaacaaaagtcattttctgcattgtgaatgtaaacatagacatcttacagcccccatttgggagtgtggctctttgagattttcacatcttgttcattgacctgctacagttatgtgaggggctccaggagaaatagactcagatggcagaatctgtaagtgtaaataagcatcttaggagtgagagatcggggccacaaagtatccagagccatgaccacaattatatttagctgtaaaatgtaatactagagtagagtatttttgatctttctcttacccaagagctagcaaatcagaatgggtgatccaggttctggagctccaccagggcagttccattttctattcagagttagcctgagtctctccagcctggcttatcattgggccatgaggcctgggtcactgggaatctctcacaatcacccaggtgtctttgaggcatttgaggatgtccagagcagaattttgtcaggctgacaagagtggttaattctgcttctgtctcagtgtaagagaaatgagtcatcctgtgtttgttcattccctcatacaagagatatctttggttggtaccccgatgacagcttctccagtttcctggtacttggataataaggagaagatctggagacccagatagataaactagctccttccacttcatatgggcattaaaaaaatacatgaagcagtcatagttcctacaatccagaaacttttagtctagactagctactggataagtaattgaagtgtgcatcatatggttggtataataaatagatgtgttaaaaatcttgggctttagaccactttctttatattgttgtgacttctgatgtctacacctgaagggagatttatgaacaaaataattgttataaattcttttttttttttgagatggtgtttcactctgtcacctggtctggcttgcagtggcacgatctcggctcactgtaaactctgccgcccgggttcaggtgactttcccttctcagcctcccgagtagctgggattacagttgcctgccactgcacctagctaatttttgtatttttactagaggcggggtttcatcatctggatcaggctggtctttaactgcttgacctcgttctgcacccgccttggtctcccaaagtcttgagattacaagcatgacccaccgcgcttggccgtatattttctatttcttttaccttgctaactgtagatatttattttctaataaaattaccctagaaaaccttaagggatttgtttaagttgcatactagtatatagtataaagttgtcagggcagtgactagaaaagataaaaactacagaaactctgggatttaagtttcttttaggtaagcttagaaacaaaacaaaactggaagtttcctagttgcatagagaacagaattctacatagggttctcaccctgccccagacgtgttcagattcatcctttttggagaccttagttaggtctgaacctaccctggagtattgcctcacagaactcattaaaggagatcagagttttggctgctgaatcctgctgcctttctagagctggtgctcacaatttcctgaaattcaaaagcagataaatcgggaaaaaaagtatgttttgtaaggtgtttgtttttaaattttttattaaaaccagtgcttgcagagacattgtatttagcaacttgttttctattcctgcagatccagtagttgctgcacaagtcaaaaaagtaaatataaacagaatgaaattttctctagactacattaaactcttctgtatctctttcatctgtctatatttagcttttattctatacaattttttaaaaaatttgatgacagagaaacagaagaaaaaataaaaatgggccctttatctaaatcctgaaaattaagaaacacttagtaccagctccccgggtgttaagagaattaaatcatataatgtgttatgcccagcaccgtgctctgtatcatactctagcacatagtgcctgcttaataaacattgcattagtacctgtgtacatgttctttttaaaatacagacttattcagatattgctgtcttctgtttcctctgtaaattttaaagagccagcaaaaaatataaaacttttaaatggaatgggctgtccttatttttactagaagtatttggttatggcaagagtgttaagtgtaagggaccctgtgctgttcctgctttctctaactaatgctcataatgagccagtggggagcaacatcagcattgacaggggacttgtttaaaacactcattcataaaccctcttcaaacatacagaatcacattacagaatgtgcggccacaattatcaagtgatttataagctcgttaaagcttgagaggcaatgcttagcttagtggttatcagcccaggcttctcattaggatcacatgaccaatttgctgaaatctcttgtaccctccccacagcttctgtttattgttgtgggtggaagcatccatgtttttttaatgaagtgcctcatgtgactctaaggtgattccagaatcaagtataagggctttaaaatatattcatgagagttaaattccacctgtgaactagagggtggtcacagggcctattctatttgggtttggtagggacaggtaagtgtggtgcatatttccattactgtagcaaaagttgctggtgtctatggcaggggagggcacctgaggacaggaaaggagaaacttatatttttatcttcatggagcagttcattgttcccgaatctcttctgttttaaaggacagaaatgggtggctttttctgtctttttctgccagaagatgtcatgctagcaggtaaacatgtggtacacctttaaaggcatattctccagatgcaggtgtaatttgtacagagaatctcatctgagaagaaactccagggaaggaggagaaagaaaaaaaaatggcttttcttcaggtaaacatgtgtcagatgaagagctgtgtccactctgcctcctggactgccatgcgtttagtactcacaaacctttacttctctacttttgtttttcctccgtgagtttgatttaactacttcttaaaattcctatgatggtcaaggatctttgaaaaatatttcttttttatatcccacagacttctctacattctgtttgtcatagcttcttatatgccatgcagaattatcagcaagaatttatgatccacattattaaaaatattccctttgtggctgttgaacacagaaagatgtgggtactcaagattcctattggggaaaactgtggtccttagtaaagatggtaaagtaaaagcctccactcgtgttccattagctatatgcagaagataattcagaaaatgcttatttaaatgggatagaatttattacccagaatgttctgaaaaaaattattaggagatacttgctctctagggtgctaaatgaagcctatttaaaattactactaaaaattacagaacataggagttaactgtattttggagtttgcataaaactgatgtttctttatggttaaattcagattataatttacgttatttgggaggaatatttcaacagtgatactgtgttctgtgtgcattaacacatcagaaaaatttgtcctagtgcagttaatggttaatgattcacttggtgaagtagctctctctcacagattttttcactatagttaattatttttctcttcattattaagcatccttatccagcggatttgcataaaccatcacatttaatctgtcagttgtccttttttctttttttttctatatagttttctatggaagatgaaggctgttatctttgtttacaggccacaaaaacttggaaaaacacaggctcttccacttactggatgtttgacaaaatatccttctcgggccaaaaacattgacatttttggtgagcttgttagaaattcaaaaaatcagacttcattccagatcttctgggaaaaaacccccgcataacaaggtcttcagcttattgtacatattaaaatttgagaggtgacttctaactcaacatgtcttttccatatgaaacatattcacatctcattctgtatgatgtaaatatagcactcaaaaatgtacatgttcatgttcatgcccttaattttatactttattatctagaaaaatatcatatatgaactgatgttgtggatctaatgctgccctttttttctcagataatacattagagaatatttctgtgttgaagattattttattggataattttagtcagtcctataagtcagaaccacttctctttactctctcatttcaccttaagtaaaattaaaaattccacccatggccacttggtgaaaatgtgtgtgtgtgtttttcagggaccattgcaatttagagatgtggccatagaattctctctggaggagtggcattgcctggacactgcacagcggaatctatataggaatgtgatgttagagaactacagtaacctggtcttccttggtgaggataactttaatacataattcataatacaccctaaaggttttatttctcttttttgtagaatgttttttagtaatttattctttgcataaaggagtttcagatccattttttccagaaaatcttcagaatttgttcatttagaaaagaatttcttcagtgcctcttgcctgtatagttctgactttgggaggctagggcggaggagattgcctgaggcgaggagttcgagaccagcctggccaacatggtcaaaccccatctctactaaaaatacaaaaaattagccaggcgttgtggcatgcggctgtaatcccagctacttgggagggtgaggcaggagaattgcttgaacccaggacacggaggttgcaatgagccgagatcgtgccgttgcactccagcctggatgacagagcaagattacttctcgagaaaaaaacaaaaatttcttcaagatgtttcatcttaatccaatctttccacattcctgagttgagctgtattcttcactctaaattagtggtaattacagaaatttactgacgtaaaatattgtagcccccacctgaaaatctaaatgccaccaccaatttttgattcagtggtaccaggtagtaaaattaagaaacctacaaattggaagtattttctttttcctttttttttttttttgagacggagtcttgctctgtcacccaggctggagtgcagtggaatgatcttggcttactgcaacctccgactcccaggttcaagcaattctcctgactcaatctcccgagtagctgggactacaggcatgcattaccatgctctgctaatgtttgtatttttagtagagatggggtttcaccatgttggccagtctggtctccaactcctgacttcgtgatccgcccgccttggcctccccctgatctcatgatccacctgctttggcctcccaaattgctgggatcacaggcgtgagccactgcacccggcaaattgaaagtattgtttaaatatctataaatttctgttataaatttgtattttggtattaatttactagaatattttatcacatcgtctttgctgagcacattactagcttgtaattggagaatatgagcaagattcatgttatttattcttaacaaaacaggtattgttgtctctaagccagacctgatcgcccatctggagcaaggaaaaaaacctttgactatgaagagacatgagatggtagccaacccctcaggtaggtgtgagtgaaaatgaatacaacagacaacacagtaagaggtcccaaggccaaagagaaagccagtccttaaaatgtgattcgggaagctgtgttccaaaggaaatagttcctgggcagctgttttttgtttttgtttctgttttttaattttgttctcacaaagggacatcttccgttttatgcttttaaattctctaaggattctacttttgttttggtgagcttccttcaagttctcagtgagagccacagtcctcttgatggcatataagagattatacaatctggctgcttttccattcttttggggacacaaaaatatttgcatgattttgaaaaactaaaactactttttagttctatttttgcatcaggtctaaaatgtgtgagagtagtttctgttgcatttttttgttcatttttctttatagtccattctatttttattactacatagtttttaagtatagtttgcaattatacatatgatatgcttctgctttgttctttttcctcaagattgctttggctattcacacttttattgtagtttcatgtaaattttagaattgtattttccattactgtgaaaaaaataccactgcaattttgataggaagtttattgaatctgtagattactttggataatatgacactttaataatacttattcttcaagttatagacataaaatattttaaaatttatttggatcttctaatttttttattgtaaagattttttatctcttagttaatttttttcccagtagttttttttaatgctacattaaataagatttttcttcctctattttgtcaaatagtttcttttaagtgcatgaaaccattcatatacttgtgtgttaattttctgttttggtaatttactatttactgagtgtatttattagtttagacagctttttaaattttttttattttttgacagtttcgctcttgttgcccaggttggagtgcagtggcacgatctcagctcaccaccaccacacctggctaattttgtatttttagtagagatggggtttcaccatgttggtcagagtggtctcaaactcccaacctcaggtgatccacccgccttggcctttcaatgtgctgggattacaggcatgagccaccacgcctagctagacagtttttaatatactgtttatggtttttaaaatatgagattgtatgatctacaaacagcaactttttacttatttttcttcaatttcagtgactttctttccttccttccttccttccttctttctttttttttcttttttttaattatactttaagtcctagtgtagatgtgcacatcgtgcaggtttgttacacatgtatacatgtgccatgttggtgtgctgcacccattaagtcgtcatttacattaggtgtatctcctaatgctatccctcccccgtccccccaccccacaacaggccccagtgtgtgatgttctccttcctgtgtccaagtgttctcattgttcaattcccacctatgaatgagaacatgcggtgtttggttttttgtccttgcgatagtttgctgagaatgatggtttccagcttcatccatgtccctgcaaaggacatgaactcatcatttttttatggttgcatagtattccatggtgtatatgtgccacattttcttaatccagtctatcattgttgtacatttgggttggttccaagtctctgctattgtgaatagtgctgcaataaacatacgtgtgcatgtgtctttatagcagcatgatttataatcctttgggtatatacccaacaatgggatggctgggtccaatggtatttctagttctagatccctgaggaatcgccacactgacttccacaatggttgaactagtttacagtcccaccaacagtgtaaaagtgttcctatttctccacatcctctccagcacctgttgtttcctgactttttaatgatcgccattctaactggagtgagatggtatctcattgtggttttgatttgcatttctctgatggccagtgatgatgagcattttttcatgtgtcttttggctgtataaatgtcttcttttgagaagtgtctattaatatccttcgcccacttttcgatggggttgtttgtttttttcttgtaaatttgtttgagttctttgtagattctggatattagccctttgtcagatgagtagattgcaaaaattttctcccattctgtaggttgcctgttcactctgatggtagttttttttttgctgtgcagaagctctttagtttaattagatcccatttgtcaattttggcttttgttgccattgcttttgttgttttagacgtgaagtccttgcctgcctatgtcctgaatggtattgcctaggttttcttctagggtttttatggttttaggtctaacatttaagtctttaatccatcttgaattaatttttgtataaggtgtaaggaagggatccagttccagctttctacatgtggctagccagttttcccaacaccatttgttaaatagggaatcctttccccatttcttgtttttgtcaggtttgtcaaagatcagatagttgtagatgtgtggcattatttctgagggctctgttctgttccattggtctatatctctgttttggtaccagtaccatgctgttttggttactgtagccttgtagtatagtttgaagtcaggtagcatgatgcctccagctttgttcttttggcttaggattgacttggtaatgtgggctcttttttggttccatatgaactttaaagtagttttttccaattctgtgaagaaagtcattggtagcttgatggggatggcattgaatctataaattaccttgggcagtatggccattttcatgatattgattcttcctacccatgagcatggaatgttcttccatgtgtttgtatcctcttttattttgttgagcagtggtttgtagttctccttgaaaagatccttcacatcccttttaagttggattcctaggtattttattctctttgaagcaattgtgaatgggagttcactcatgatttggctctgtgtttgtctgttattggtgtataagaatgcttgtgattttttcacattgattttgtatcctgagactttgctgaagttgcttatcagcttgagattttgggctgagacgatggggttttctagatatacaatcatgtcatctgcaaacagtgacaatttgacttcctcttttcctaattgaataccctttatttccttctcctgcctgattgccctggctggaacttccaacactatgttgagtaggattggtaagagagggcatccctgtcttgtgccagttttcaaagggaatgcttccagtttttgcccattcagtatgatattggctgtgggtttgtcataaatagctcttattattttgagatacatcccatcaatacctaatttattgagagtttttagcatgaagggctgttgaattttgtcaaaggccttttctgcagctattgagataatcatgtggtttttgttgttggttctgtttatatgctggattatgtttattgatttgtgtatgttgaaccagcctggcatcccagggatgaagcccacttgatcatggtggataagctttttgatgtgttgctggattcggtttgccagcttattgaggatttttgcatcgatgttcatcagggatgttggtctaaaattctctttttttgttgtgtctctgccaggctttggtatcaggatgatgctggcctcataaaatgagttagggaggattccctctttttctattgattgggatagttccagaaggaatggtaccggctcctccttgtacctctggtagaattcagctgtgaatccatctggtcctggactttttttggttggcaagctattattgcctcaatttcagagcctgttattggtctattcagagattcaagttcttcctggtttagtcttgggagggtgtatgtgttgaggaatttatccatttcttctagattttctagtttatttgcgtagaggtgtttatggtattctctgatggtagtttgtatttctgtgggatgggtggtgatatcccctttatcattttttattgcatctatttgattcttctctcttttcttcattagtcttgctagcggtctatcaatttggttgatctttgcaaaaaactagctcctggattcattgattttttgaagagttttttgtgtctctatctccttcagttctgctctgatcttagttatttcttgccttctgctagcttttgaatgtgtttgctcttgcttctctagttcttttaattgtgatgttagggtgtcaattttagatctttcctgctttctcttgtgggcatttagtgctataaatttccctctacacactgctttaaatgtgtcccagagattctggtatgttttgtctttgttctcattggtttcaaagaacatgtttatttctgccttcatttccttatgtacccagtagtcattctggagcaggttgttcagtttccatgtagttgagcggttttgagtgagtttcttaatcctgagttctagtttgattgcactgtggtctgagaggcagtttgttataatttctgttcttttacatttgctgaggagtgctttacttccaactatgtggtcaattttggaataagtgcagtgtggtgctgagaagaatgtatattctgttgatttggggtggagagttctgtggatgtctgttaggtctgcttggtgcagagctgagttcaattcctggatatccttgttaactttttgtctcattgatctgtctaatgttgataatggggtgttaaagtctcccattattactgtgtgggagtcttaagtctctttgtaggtctctaaggacttgctttatgaatctgggtgctcctgtattgggtgcatatatatttaggatagttagctcttcttgttgaattgatccctttaccattatgtaatggccttctttgtctcttttgatctttgttggtttaaagtctgttttatcagagactaggattgcaacccctgcctttttttgttttccatttgcttggtagatcttcctccatccctttattttgagcctatgtgtgtctctgcatgtgagatgggtttcctgaatatagcacactgatgggtcttgactctttatccaatttgccagtctttgtcttttaattggagcatttagcccattgacatttaaggttaatattgttatatgtgagtttgatcctgtcattatgatgttagctagttattttgctcattcgttgatgcagtttcttcttagcctcgatggtctttactatttggcatgtttttgcagtggctggtaccagttgttcctttccatgtttagtgcttccttcaggagctcttgtagagcaggcctggtggtgacaaaatctctcagcatttgcttgtctgtaaaggattttatttctccttcactgatgaagcttagtttggctgggtatgaaattctgggttaaaaattcttttctttaagaatgttgaatattggcccccactctcttctggcttgtagagtttctgccgagaggtcagctgttagtctgatgggcttccctttgtgggtaacctgacctttctctctggctgcccttttttccttcatttcaactttggtgaatctgacaattatgtgtcttggagttgctcttcttgaggagtatctttgtggcattctctgtatttcctgaatttgaatgttgggctgccttgctagattggggaagttctcctggataatatcctgcagagtgttttccagcttggttccattctccccatcactttcaggtacactaatcagatgtagatttggtcttttcacatagtctcatatttcttggaggctttgttcatttctttttattcttttttctctaaacttcccttctcgcttcatttcattcatttgatcatccatcactgacaccctttcttccagttgatcaaatcagctactgatgcttatgcatttgtcacatagttctcgtgccatggttttcagctccatcaggtcctttaaggacttctctgcattggttcctttagttagccattcgtctaatcttttttcaaggtttttaacttctttgccatgggtttgaacttcctcctttagcttggagaagtttgatcgtctgaagccttctcttaactcatcaaagtcattctccattcagctttgttccattgctggtgaggagctgtgttcctttggagggggagaggcactctgatttttataattttcagtttttctgctctgtttttccccatctttgtggttttatctacctttggtctttgatgatggtgacatacagatggggttttggtgtggatgtcctttctgtttgttagttttccttctaacagtcaggaccctcagctgcaggtccgttggagtttgctggaggtccactccagaccctgtttgcctgggtatcagcagcggaggctgcagaacagcgaatattggtgaacagcaaatgttgctgctccagagatcattcctctggaagtttcatctcagaggggtacccggccgtgtgaggtgtcaatctgctcctacttgggggtgccttccagttaggctactcaggggtcagggacccacttgaataggcagtctgtctgttctcagatctcaagctccatgctgggagaaccactactgtcttccaagctgtcagaggtttctcctgcaattttgtttggctatgccctgcccccagaggtggagtctacagaggcaggcaggcctccttgagctgtggtgggctccacgcagttcgagcttcctggatgctttgtttacctactcaagcctcagcaatggcaggcgcccctcccccagcctcgctggtgccttaaagtttgatctcagactgctgtgctagcaatgagcgaggctccatgggtgtaggaccctctgagccaggcatgggatataatctcctggtttgccatttgctaagactgtcagaaaagtgcagtattagggtgggagtgacccaattttccaggtgctgtctgtcacccctttccttggctaggaaagagaattccctgatcccttgcacttcccaggtgaggtgatgcctcgccctgcttcggctcacacttggtgtgctgcacccattgtcctgcaccccttgtccgacaattcccagtgagatgaacccggtacctcagttggagatgcagaaatcatccgtcttctgtgttgctcacactgggagctgtagactgcagctgttcctatttggccatcttggaactgtccccttccttccttccttccttctttcttctttcttttgttttttggtgggatttcagtcttgttgcccaggctggagtgcaatggcatgatttcggctcactgcaacctttgcttcctgggttcaagcaattgtcctgcctcagcctccagagtagcttggattacaggtgtttgccacaatgcctggctaattttttgtaattttttagtagagatgaggtttcaccatgttggtaaggctggtcggaaactcctgaccttagatgatccgcccgtctctgcctcccaaagtgctgggattacagccgtgagccaccgcacccagccggattttttttagttctgtgaataattttctgtcacatacttctagtgctacattcaaatagatgtattgccaatggacacaatatagttttgtattggtgtctgaatatgatggagcaaacacctcttcaagttttcataaaccgatttttgaagcatttcctcaggtaactgtgtgggtttctttttttctttctttttttttttctctttttttgaggtggggtttcattcctgttgcccaggctgaagtgcaatggtgcaatctaggctcactgcaacctccacctcctgggttcaagagattctcctgcctcagcctcccaagtagctggaattacaggcatgtgccaccacacccgggtgattttgtatttttagtagagagggggtttctccatattggtcaggctggtctcccaactcctgacctcaggtgatccacctgcctcagcctcccaaagtgctggaattacaggcatgaggcaccccgcctggcccaactgtgtggatttctatgtagacagaactgaccataaactgtggttcaggcaactgaaattgaatcattgatttgcttcagggaacgcagtaaaagcgaaggtctgtaggcctgcctacatggctgtacatggatgcctttattcaggtctctggaatggcatgacctctcccagactgtggctgggatgagtttgggatggttacagagtaagttcagaattctcagtgagaccaagttggctgaactctatcctgggctgtagccaagaacaggggtcctgtagtttcccacctgaatgaaggcctcccttctgaatagaacacgtccaatcttcagctttaacagcatttcacaactccctccccggatctcaaatttctgttagaggcacttattttggagatgtcatcttgctacataatccaggctggtctcaaaatcctgacctgaagcagttctcaaaccttaatgtaccgtggagctgtcattacagttgtgaaccataatgcctggttttctcataaaggcatgtttgtcaaggatggttgagatcttttttgctgtaaggggatatgaaaatagggcacttttaatcttttcatcttactgatgtcactctccctgtagatttttactttctattttctacttcaaatttgtctgtaatttgagattcagatatttaggacaatatgctagaatttgcatggtatgcctcaagtaaattagataattagtaggcactccatatttacgaaaatagttacttgtaaatttcagtttgctgcaggcaaaaaggaattaaaggattttcatctacttactttaacctatatctaaataataatatactttattttctaatatttgttttacatatcagagggtctaaccctattctgcaaaatatgtattttctttatttaaaaatgtaagactactctttgcttctaaaattggattacagcagtttcattttgtgtaagaatagcatatatttaaaacaaaagtaactctaggttcttttaaatgctaatttattaagtttcttattagaatcttctatttataattatacggcatattctctgaaattttactgccatacagtgcataccaatgattcaaaatacctgcacttcatgagtacaaactaaaagctaaatattgcagttacctagaattttttttttttttttttttagatggagtcaatctctgtcatccaggctagcgtgcagtggtgcggtcttggctcactgcaacctccacctccaggttcaagccattctcgtgcctcagtctcccaagtagatgggattacaggcatgtgtccccacacccagctaaattttgtattattagtagagacggggcttcactacattggccaggcaggtcttgaactcctgacctcaggtgatccactcgccttggcctcccaaaatgctgagataacagacatgagccactgcacccagcctgacaattattttttttgtgatacatcaatgttgcatactagattttatgaggaaacatttctattattgtttcaaagttccatattagtgtgttttctcagtgtagggttttttttttttccgagacagagtctcactctgtcgcacaggctggagcgcagtggcgtgatcttgcctcactgcaacctctgcctccggggttcaagggattgtggttcgtgcctcagcctcccaaagtgctaagattacaggtgtgagccactgcacccagcctcattgtaggtttcttaacattagtttcttgtgttttttgattttacttaagtattataattttagacaatttgtaattctgttggtacactttaagtcaatttgaggtttaattaagaaataaattatgcatgtctatcaatcagattatatatgtatatgtgtatatctataaatatgactccaattttagttatggcttatattctttcttagctgattttcgatggtagttttatcttgtctaagtgagagtcatggagatagtcttattttcaccatgtgtttaatgattaatgtatatttctttttgtgaaagaaacacttttgtgatttgaaggtaattttcaaaaagatttataattctgtatttttttcagtttttctttaaaaacattgttttaaaaacacataacataaaatttaccatcttaaatttattgaagtttatatttcagggccaggtgtggttgtggtgctcatgtgtaatcccaggattttgggaggtcaagccaagaggatccctggagcccaaaagtttgagaacagcctgggcaacatatggagacccctctctatgaaaaaaatttaataatagccaggcatggtggtgtgcagctgtggtcccagctacttgggagattgaagggagtcaaaattgtgccactacactccagcttgggtgacagagtgagaccctatctcaaaaaaagctgttcatttcaggcatgttaagtatattcacattgttatgcaaaagacttctagaaacttaacatcttgtaaaacttaaattcaatgtccattaagtaacaactgctcattttaccctctctccataccttgagagacaagccttctactttctgtttttatgattttgactacttaagatatctcataagtggaatcatacagtatccataattttgttactggattaattcaggtgacataatattcacaaggttcatctaaaaaggtgacaagattattctctttaaggtggaataatattccattgtatgtatatgttacattttttaatatgtttataagtcaagagacatctagggtgcttcagcctattggcttttgtgaatactgattacaataaacatggatttgctttgctgcccaggctaaagtgcagtggtgcaatctcagctctctgcaacctctgccttctggttcaagcaattcttgtacctcagcctcccaagtagctgggattacatgtgcatgccacatcgccaagctaatttttatatttttagtagagatggtgttttaccatgttggccaggctagtctcgaacttctgacctcaggtatctgccaacctcaccctccccagttgctaggattacaggcttgagacactgcacctggcctgtgttaacatgttttggatatagatttatgaatacttttttccatttatgtatttttatgtctaagtagtttatttaaaatatgtttttgtatcattcaagaaaataagccaactttatcagtgttgataatcagttcttgaagagattatttttctctattttgtaaacatggcaactttgtggaaaatcatttgatcatatacaaaatggttcatttctgagctctctattctgttctttcatctgtttatgtttgtgtcagtatcatattgtttatgttactgtagcttttaactgtaggttgtattgatatctttgaaaaatgaaatttttgacccctgagcaagaatatattgaagagtgtgtttcatattcacatatttttgaatttgccagtttgacttttgctttttaatttctagttttattcaggttttattagaaaacaacccagtgcataattttagtgtttttaaattgatttgttgttgttttgagacaagatcttactgtcacccaggctgcagtgcagtggcagaattttagcttattgtagcctcaacctcctgggctcaagtgattgttctttcacctcagttttttgagtaggtaggactgtagacatgcactaccatgtaaggctaattgtttgcttttttgtagtgttaggatctcactatgttgcccaggctggtctcaaacttttgacaccaatggatctcccaaagtgttaggattataggcaagagccatggcacccaatcagtatttttaaatttaataaaacttgttatgtgtcctaacagaatataccaggtgcaaataagaatattgtgtattatcttggttttgactggagagttttgtgtgtgtctgtgaagcctagttggtctataatatggtttggatgtctatgttgtccaaatctcatgctgcaatataaatcctcaatgttggctatgggacctggtgggacacgtttgggtcattgggggcaaatttctcatgaatggcttggtacatcctctcggtaaccaaaaagtttacactgtatcaattcaaataagagctggttcattaaaagaacgtggcttcttcacctcatacttgctctgtctcttaccatataatatgtccagttactctttaccttccaccttcattttaagctttctgaaatcctcaccagaagcagatgctggcacacacttcttatacactctgccaagctgtgagccaaataaacaatttttctttataaattatgcactctcaagtatttctctatatgcaaaagaatcaatatagtctataatgttgtctaagttttttggttgttattttttacctgaattttctattattgcaaactgggtcttgatgtctacaatcattatgttgctatgtatatctcgcttcacttttatcaatatttgctttatatattttggagctctgatgttatgtacacatatacatatagatagataaatattttagttatacattcctgctaaatcaactcactttaccatcatataacgtaggcaccagccccacaggattagtgggtttttctccctgtgtgcagagataagagattgtagggccgggcgtggtggctcacgcctgtaatcccagcactttgggaggccgaggcgggcggatcacgaggtcaggagatcgagaccatcccggctaaaacggtgaaaccccgtctctactaaaaatacaaaaaattagccgggcgtagtggcgggcgcctgtagtcccagctacttgggaggctgaggcaggagaatggcgtgaacccgggaggcggagcttgcagtgagccgagatcgcgccactgcactccagcctgggcaacagagcgagactccgtctcaaaaaaaaaaaaaaaaaaaaaaaaagagattgtagaaataaagacacaagacaaagagataaaagacagctgggcccgggggaccactaccaccaagacgtggagaccgatagtggccccgaatgtctggctgcagtgttatttattgaatacaaagcaaaaggggcagggtaaagagtgtgagtcatctccaatgataggtaaggtcacgtgggtcacgtgtccactggacagggggcccttccctgcctggcagccaaggcagagagagagagggagagagagagacagcttatgccattatttctgcatatcagagacttttagtactttcactaattttgctactcttatctaaaaggcagagccaggtgtacagtatggaacctgaaagcagactaggagcgtgaccactgaagcacagcatcacagggagacggttaggcctccggataactgcaggcaggcctgactgatgtcaggccctccacaagaggtggaggagtagagtcttctctaaactcccccagggaaagggagactccctttcctggtccgctaagtagcaggtgtttttccttgacactgaggctactgctagaccgcggtctgctaggcaacgggcgtcttcccagacgctggcattactgctagaccaaggagccctctggtggccttgtctgggcataacagaaggctctcactcttgtcttctggtaacttctcactatgtcccctcagctcctatctctgtatggcctggcttttcctaggttgtgattatagatcgaggattattataatattggaataaaaagtaattgctaccaactaatgattaatgatattcatatataatcatatctaagatctatatctggtataactattcttatcttatattttattatgctggaacagctcatgtccttggtctcctgcctcggcacctaggtggcttgctgcccacaatataatatcaatttttgtcttgtagaagtacttgatttaaagcatattatgtctaatataattatgaccaccttactcaattgtggttgctattttcatggaatatacatttttttcattctgttactttctgcctatttgacttaatgctaaagtaagtcccttgtaggcagcacactgtatgcttttttaaaaaaaccacttaggcattctatatctttttctttatataattttatttatatatatatttatatttgtatttatttatttatttattttatttggtttgtttttgagatggagtttcactcttgttgcccaggctggagtgcaatggcatgatctcagctcactgcaaccttcacctcccagtttcaagtgattctcctgcctcagccccctgagtagctgggattacaggtgcatgccaccatgcccagctaattttttgtaagtttagtagagacgggatttcactatgatggccaggcttgtcttgaactcctgaattcaggtgatctgcctgcctcagcctcccaaagtgttgggattactagcatgagccactgcacccagcctcatttatttttgagatagtgtctcactctgtcaaccagcttatttgtattttttgtagagacagaggtttgccatgttgcccaggctgatcttgaacttttgggttcaagtgatcagcccatcttgaacttccaaattcctatgattacatttcattttatttagtagtttaatctatatttaaaatgattggttaaagaaatgaagttgttattaccactaatattgttattgttttatgtgtttctagtagttatatttttctcatttcctgttttacttacttaattttcatttaattttgtactggcatgctttgattatattttattttcttttgcatactttgtataaataatatcttagtaatcatctcaaaaactggagattacatacatcttaaagttaaaacaatatattttaatctcataacaacttcaattgaataaaaactatgcctctatattttccagtttgttattgatataaaaattattttatatggtgtatctacaggtgcacgcctgttatcccagcactttgggaggccaaggtgggtggatcccgaggtcaggagatcgagaccatctggccaacatggtgaaatcccatctctactaaaatacaaaaaattagccaggcatggtggcccatgcctgtagtacgagctactcaggaggttgaggcaggggaatcactagaacccaggaggcactccagcctgggagacagagtgagactccatctcaaaatatatatatatttccaaatattcagtttggtcttattatattgacattgttatgcaacatatcactagagtgttttttatcttgcaaagctaaatctcagtacacagtaaataactaccaatcctttgtattttgtggttcttttcaaacaccactctgttttctgtttctaagagtataactgctttatatatctcatccaatctctgtctttttgcggctgggtcactttattttgcataatgtcatcaatatttatcttaatagttgttacagtattttctgctttttgaaaactgagtgataattcctgtacttttgtgtctactgaatgatttggtgacacaaatttcgattacttttacctagtggcttgcagtaacaatgctacaataattatgtgaaagttaatgtaatatatttgctgcattctgttttattagtctactttttcacctttatactcataccaaattattttaattctgtagctttttgatgtgttttgaaatcagaaatggtattgcctgtaacattgttcctgtttttgaagattgctgggtactttattgtctgtttggattccatatacttttaaatttgttgtttttatttctttgaaaatgctgtgagtcatttgaaagacattgcattaaatctgtagattaaattgagcagtaaagacatcttcaaaatattgtttttcaattgtttgtttttgagatggagttaaatttacctgccttaccagttacatttgtgccattttggtttgtatgtttttgttacatttatatgttcaggaagacattacagcttgtggtattttactatgtcatcttagttatgtagtttgtataattttataggttagatttgtaaagtatatttatctgagtctagcaattgaagtaatgtgtttttattgtttctttcagttatatgttctcattttgcccaagatctttggccagagcagaacataaaagattctttccaaaaagtgatactgagaagatatgaaaaacgtggacatggaaatttacagttaataaaaaggtgtgaaagtgtagatgagtgtaaggtgcacacaggaggttataatggacttaaccagtgtagtacaactacccagagcaaagtatttcaatgtgataaatatgggaaagtctttcataaattttcaaattcaaatagacataatataagacatactgaaaaaaaacctttcaaatgcatagaatgtggcaaagcttttaaccagttctcaacccttataacacataagaaaattcatactggagagaaaccctacatttgtgaagaatgtggcaaagcctttaagtactcctctgcccttaatacacataagagaattcatactggagagaaaccatacaagtgtgataaatgtgacaaagcctttattgcatcctcaacccttagtaaacatgagatcattcatactggaaagaaaccctacaagtgtgaagaatgtggcaaagcttttaaccaatcctcgacacttactaaacataagaaaattcatactggagagaaaccctacaaatgtgaagaatgtggcaaagcttttaaccaatcctcaacacttactaaacataagaaaattcatactggagagaagccctacgtttgtgaagaatgtggcaaagcctttaagtactcccgtatccttactacacataagagaattcatactggagagaaaccatacaagtgtaataaatgtggcaaagcctttattgcatcctcaacccttagtagacatgagttcattcatatgggaaagaaacattacaaatgtgaagaatgtggcaaagccttcatttggtcctcagtcctaactagacataagagagttcatactggagagaagccctacaaatgtgaagaatgtggcaaagcctttaagtactcctctacccttagttcacataagagaagtcatactggagagaaaccctacaaatgtgaagaatgtggcaaagcctttgttgcatcctcaacccttagtaaacatgagatcattcatactggaaagaaaccctacaagtgtgaagaatgtggcaaagcttttaaccagtcctcatcccttactaaacataagaaaattcatactggagagaaaccctacaaatgtgaagaatgtggcaaagcttttaaccagtcctcttcccttactaaacataagaaaattcatactggagagaaaccctacaaatgtgaagaatgtggcaaagcttttaaccagtcctcaacccttattaaacataagaaaattcatactagagagaaaccctacaaatgtgaagaatgtggcaaagcttttcacctatccacacaccttactacacataagatacttcatactggagagaaaccttatagatgtagagaatgtggcaaagcttttaaccattctgcaaccctttcttcacataagaaaatccattctggagagaaaccatacgagtgtgataaatgtggcaaagcctttatttcaccctcaagccttagtagacatgagataattcatactggggagaaaccctagaagtgtgaagaatgtggcaaagccttcaagtggtcctcacaccttactatacactgagagttctgaacttactctgtaaccatcccaaactcctcccaggcacagtctggcagaggtcctgccatttcggagacctggaggaagtggcccatttacagccatgtaggcaggcctgcagaccttggcctttactacggtacctgaagtggttcaatgactcagtttcagttacctgagccacagcttaaggtcagttctgcctatatagaaacccacacagttaacctgaggaaatgctctctggtactcactgaaagccacactcatccacatcctgatacaaggcccaccatatgcagacctgactgccaaaacatgccctagtgtctgccgtacagagtgaagtcctgaaggatatttagtctgtccaaaactaaaatgaagatttcaactccccaaccccctctaacaagccagctaaaggtggactatagtgcagacccagcaaccttgtgaccaggctaaaacccctcatcactacaaattcagagggcatctcatcaccctaagggcccaacgaaagatctttaccttctaacatcagtttatgaaaacttgaaaaggtgtttgctccatcaaattcagacaccagtacaaaactatattatgcccattgtctggttctattttaatgtagcactggaagtgtgtggcagaagaattagtcaaagaaataaaaatagccattgaaattgaagaaaaatgttgctgtttgtagatcatacaatcttatatttgaaaaaccttaaacagtacattaaaacccgtctaaactaataaatacactcagtaaattaacaaaatataaaatcaacatacatgtatatgtatggttttatacacttaaactatctaattaaacagaggaacacactgggcactttggctcacgcctgtaatcccagcactttgggaggccaaggcgggtgaatgatctgaggtcaggagttacagatcagcctggccaacatgttgaaatcccatctctactaaaaatacaaaaattagctgggaatggtggctagcacctgcagtccaagctagtttggaggctgagggaggagaattgcttgaatttgggaggtggaggttgtggtgagcagagatcgtgccattgcactccagcctgggcaacagtgccagactccatctgaaaaagaaaaaaaaaagaaaatcgtatttactatagcattaaataataaatgtctggccaggcctggtggctcatgcctgtaatgtcaaggtgggcggatcacaaggtcaggtgatcgagaccatcttggccgtggtgaaaccccatctcaactaaaatataaaaaattagctgggcatggtggtgcatgtctgtagtttcagctaattaggactgaggcaggagaatcgctagaacccagggaggtggaggtttcagtgaactgagatcatgccactgcactccagcctggagaaagagcaagacactttctcaaaaaataaatacataaatctctgagaaaataaccaaaaaggtaagaaatctttacaataaaaatatcaataaaaaattagagaaaatccaaataaatataaaacattttatctctgggttgaaagtaaatatcattaaagtgccgtattatccaaagttatctacagattcaataaacttcctatcaaaacttgcagtggtatttctttcacaataatggaaaatactattttaaaatttatgtgaaactaaaaatttgaatagccaaagcaatcttgaggaaaaaaaaagcagaaggatatcatacttataatgtcaagctgtatttcaagactgtattctaataaaaaccaaatggattgtgcaaaaaaatgagcaaaaatgcaacagaaactaacacatatttcagacatgatgaaaaaaacttaatagtttatcaaaatcatgcagatatttgtgtgtccccaaaacaatagaaaagcagccagattgtgcagtctcttatataccatgaagaggactttggctctcactgtgaacttgaaggaagttcactgaaagaaaagtagaatccttagagaatttaaaagcataagacagaagatgcccctttgtgagagcaaaatttagaaacaaaaaaaacagctgctcaggaaatatttcctttggaatacaacttccaaattagattttaagaactggttttctctttgactttgagacttcttacctgtgttttccgttgtattcattttcactcatacctacctggggggttggcaatcatctcatgtctcttcagagccaaaggtttttttccctgctccagatgagtgatcaggtctggcttagagacaacaatactgttgtattaagaataaataacatgaatcgtgctcatattctccaattacaagctagtaatgtgttcagtagagaggatgtgataaaatattctagtaaattaattacaaaatactaatctataacaaatttctaaatatttagaaaatgctttcaatttgtaggtttcttaattttactatctaatactactgaatcaaaaattggtggcaattagattttcaggtgggggcaagaatactttgtcactaaatttttggaattaccactaatttagagtgaattatacagctcaaatcaggaatgtggaaagtttggattaagatgaaacatcttgaagagacttttctgcatgagcaaattttgaagattttctgaaaaaaggggatctgaaactcttttatgcaaagaatagattactaaaaagttctacataaaagagaaataaaacctttagggtatattatgaattatgtcttaaagttatcctcaacaagaaagaccatatttccatagttctctaacatcacattcgtatacaacttccgctgtacagtgtccaggcaatgccactcctccagagataattctatggccacatctctaaattgcaatggtccctgaagaacacacacatttttaccaagtggccaggtgtggaatttttaatttgacttaaggtgaaatgagagagtaaagagaagtggttctgacttatagcactgactaaaattatccaataaaataattttcaaaacagaaatattattctctaactatgataaaaaaaaaaaagcaccataagatccagaacaacagttcatatattttatttttctagataataaagtataaaattaagggcatgaacacgaacatgtacatttttgagtgctatatttacatcatacggaatgagttgtgaatatttttcagatggaaaagacattcacttaggcatttctcaaatttattatgtacaataagctgaagaccttatgcaggtttttttttttttccaagaagatctggagtaagtctgatttacgtatttatttccttttcttttttatttgagacggagtttcatgcttgttgcccaggcttctgtgcagtggcatcatcttggctcacggcagtgtccccctcctgggttcaagcaattctcctgcctcagcctcctgagtagttgagattacaggcatgtgcctccacgcccagctatttttgtatttttagtagagacagggtattctccatgttggtcaggctggtctcaaactcccaacctcaggtgatctgcctgccttggcctcccaaaatgctgtgattacaggcatgagccagggctccccgctgattttttgaatttctaacaagcttaccagtaatgctaacgtttttggcctaataaggatattttgtcaaagatccagtaagtggtagagcctgtgttttcccagtttttctagcctgtaaacaaagataagagccttcattttctaaagaaaaatatgtagaaaaaataaaaggagaactgccagattaaatgtgatcacttgtgtagagcagctgcataaagataattatgaagagaaaaatagttatctctacagtgaaaaaaatcaatcagctatttcaccaagtgaatcattaaccattaactgcactaggacaaatttttatgatgtgctactgcacacagaagaacacagcatcactgttgaaatattcctccccaaaacagtaaactagtctgaatttaaccataaacaacagtttatgcaaacttcaaaatacaggtaactcctatgttctgtaatttttagtaggaattttaattaggcttcatttagcaccctagagagcaagtatctcctaataatttttttcagaactttctgggtaataaatgccattccatttaaatcagcattttcttaatcctcttctgcatagagctaatggaacacacagctggagcctcaacattacatgttctccatctttactaagggccacagttttccccaatagaaaccttgagtatccacatctttccatgttcaacagccacaaagggaacatttttaatattgcaggtcataaattcttgcggagcattctgcatggcatataagaagctatgacgtacagaatgtagagaagtctgtgggacataggacagaaacgttttccagagacccttgactatcataagaattttaagaagtagttaaaccaaactccttagggaggaaaaacacaagtagagaagtaaaggtttgtgagtactaaacgcatggcagtccaggaggcagagtggacacagctcttcatctgacacatgtttacctgaagaaaagccatttttttctttctcctcctcctctggaattccttctcagatgagattctctggacaagttacacctgcatatggagaatatgcctttaaaggtgtcagtaccacatttacctgctagtatgacatcaactggcagaaaaagaaaaattcacttactgctgtcttttaaacagaatagattcaggaataatgagctgctccatgaagacaaaaatataagcttctcctttcctgtcctcaggtgccctcccctgccagagactccagcaatttctgctacagtaatggaaatatgcaccacactgacctgtccctaccaaacccaaacagaacaggccctgtgaccaccctttagtgcaaaggtggaacttaactctcgaaaatgtattttgaagccttcatacttgattctggcctcaccttagagtcacatgaggcccttcattaaaacaacatggatccttccacccagaacaataaacagaagctgtggggagggcacaagtataaatcacttggtaattttggtcccacattatgtaaggtgattctgcaggtttgaaaagggtttatgaaagagtgttttaaacaagtctcctgtcaatgctgatgttgctcccccttggctcattattagcattagagaaagcaggcagagcacagggtcccttacacttaacacccttctcacaaccaaatacttgtcgtgcaaataaggacaacccatctccatcctaaagttttatattctttgctggctctttaagtttatagaggaaacagaaggcagcaatgtttgaataagtctgggtttaaaaaacaacatgtacacatgtactactgcaatgtttattaagcaagtactatgtgctcaagagtatgatacagagcactgtgctgggcataacacattatgtgatttaattctcataataccctgggagctagtactaagggtttaggaattttcaggatttagataaagggcccagcatttttattcttctgtttctctgtcatcaaattttttaaaaagttgtaagaaataaaagctaaatatagacagatagaaaagatatagaaaggatgagtttaatgcagtttagagaaaattttattctgtttatgtttacttttttgttacttggggagcaattactggatctgcaggaatagaaaacaagttgctaaatagaatgtctctgcaagcactggttttaatagaaaacttaaaagctaagactctataatacatactttatttttcccattcatctgcttttgggtttcaggaaattgtgagcaccagctctagaaaggcagcaggattcaccagccaaaactcttgatctctactaatcagttctgagagcaagactccagggtatggtcagacctaaataaggccttcaaaaagaatatatgtaaacaagtctggggcagtgtgaggaccctatgtagaattctgttctctatgtcactggggtactaccagatttgtttcttctaaatgtcctaaaagaaacttaaatccaacagtttctgtaatttaaatattttctagccactgccctgtcaactttatactatatactaatatgcaatttaaacaaaccccttaaggttttctagggtaattttattggaaaataaatatcgtacacttaacaagtgaaagaaatagaaattatacagccggatgtggtggctcacgcccataatcccagcactttgggaggctgaggcaggtggatcacgaggtcaggagtacaggaccagcctgatgagatggtgaaacctcgtctctactaaaagtacaaaaatttgccaggtgcagtggcatgtgccagtaatcccagctactcgggaggctgtgtcaggagaatcacttgaacctggacagcagaggttgcagtgagctgagatcatgccactgaactccagcctgggacacagagtgagactccatctggacatcctcaaatgcctcaaagacacctaggtgattgtgagagattcccagtgatctggggctgatggcccaataataagccaggctggagacttaggctgattctacatagaaaatggaagtgccctagtggagctcctgaacctggatcacctgttctgattttctagctcttgaaagaaagaacaaaaatactctactccagtatcacattttacaggtaaatgtagttgtggtcatggctctggatactttggggccttgatctcttactcctaagatgcttatttacactgacagattctgccctcagattctatttccttctggagcctctcacataactgtagcaggtcaatgaacaagatgtgaaaaatctcaaagagccacactcccaaatggaggctatgtctatgtttacatttcacaacgcagaaaatatcttttgtttgtttctgtacattctcaatcaaaagtccggccctgttttgtaaatccaaggcagaggccagaccttattggcagattctaggcaggatccacctggatttgcatcctttggtgttacagaaagtgaagcacaatcaaaggagagatcccctcatagagtctgctctagcacattctaaatgataaatctacatgaaaaaaagagaaaaagctgacacaacatgaatataagtagacactttattttggtcaaacttaagaattataacctgggagcaaagattcaagttgcctggaatctacagtttgattagcagcagttacaagaggatttgtaatgacaacaagagagggacagagagtgggctgatacaaagttgattgttagaaatttttatttatttacagaaataactgattattgatgagatatatattgtatatatatggttatggtttagggtacgggatatagtgtccaatgtggcattattagtttatagctacttggggcaatagtgtacagtttcaagagatgaatacatatttcaaatggggaagacaggcgtaactacacttgcattttaatgtctctctgagtttgataaccaaaggacttgcattttccagataaaagttttttatttcccaaatctcaagacctggattcaaaatttggagctgcagatttagaacctgaacggctggagtagcagcgggtgttaactgcagatttgtgagcatttcagcaagaggaggaaggggaaagtggagattctgtctacatgtctactcaatgcacacatgttactctgattgggtttttgggccccgtggtgtctgaatcagtttcaggtatgaagatacaatgattgattggtgccccgtggagtttgtagaaatctggacctaacctctctagaagtgactgtagaggattatagataccatataggcagagacacaattctgcctgcatatttaggggacagtgtgcactttgtagcacaggtgtgagttgactggaagtctgagagggaaagtcccctctagagtaaattctggttttcaccttatgtgtttatatcatgtctgctaattctagaccatgcttggaaacaataattaaaagaaaaattttctccagcctcagagaaactccacaataataagatagaaagaaaacattttattacacaattgaacttgaatgtgacatgcatcatagtcaatctgcttaagagactgcaaagacagaaggatggtcaccaaaattagtccacaagtagaagaatttccagcaccatgtcatacataattcatcctaaattcatctggagattgaagaggccatctgtgtatgctaattgcttatattcaatgacaaataaacttttcccatcttcatagcaggaggtagcttagcagcttgaagccaggtgcctgctgaaggtaagatttcactctgctacaaaaatggttgaatagggttctatcttgatttggctatttacattttagagcagtgtctctgcactccctggcactgggctacagcactcctgcttgctttctcctggttactagtgtcctctgttgacttctacaatttgctactgaggcacagcccagagcacagctcacattttatgtgaaccccatttgccacagcagcactctagtgtcacatcagagagtgaggcctgagctgcaggaggagagcctgcaggcctcatgggtagatttacaccttcacaataatgggaatgtaagcagtgtttcagccccagtttctatttataatggtgaaatggaaaaaatactaccgaattcccaggatgagtccagatacccttaccctgaatactctgcagctgcattcctaagcccttatctaggtgccacagtagaatttgcagtcatggtacagcatgcaaaccctaattacagccatatgggcagcatgggggaggtcataggaaatatgaacaaaccttaattacacattcctgtgaactcctgtttttcagctagctgccgccataaatgtcacatgatgaggtgttgcaagttcatggtaaactgataaactgcctttgtgcctgttcctaactgataaactatctagcggcaaagttaactcccttaagcccctctcatctcacataaacccctcactttgtaagctcagggctacctcttctgattgctgtggaccagcccggtaggttaataaacttacttgcctgactttgggtctacttgtcctttctctcggccaaccttacattttggtgtcaaaacctgggaagaggtagactctggccgggcgtccctagaggactttctgtcactctctctctcacactctccctcctcccaggcttgctggtcattgtgcgctggagcctaggtgcctttccccctctcctgccaccccctgctagccaccctccccttcccaaacctgctgaaggcccaaaggatctcctagactctcccattgttggtgacttcattcaccttcagagcctccaaaggggtaagagagagagtcttgccatttacccggaacccttgactgtctctgcattcccaaaagacccagcgctgagccaagggctttcttcagcctccagtcctctggtttctccatttcaggaggcagctacctcctacattccggacagggcttgtgggacaggggacgccctcacctgccatccttgtcaactggcagtctcttcttcctctacccccctcctctatttaccatgggagcttctcattctacccctcctaaaaccaccccccttgggtatcttttgcacaacctcaatgctctcagcctccattcaagggtccatcctaagaggcttattttctaccgtaatactgcctggcctcaatacaaattggacaatggctcccaatcacccgaaaatggcacttttgatttcaacatgcttacagacttagacaacttttgccaccgcaatgggaaatggtctgagattccttatgttcaggctttcttcactctccatagccacccttctctctgccagtcctgttctactttccaaatcctccttgcctgctctaaacctgatttgcctcctaccaccctccctacgaccccagccgacgactcatcccctactaccctccccatcgccccagctgatgactcctcttcctttgaccccaccaattttccccctccccgtcaacatcatgatcctctgccagagcatcatgatcctcctccgtatgcccccgctctggctctacttctttctccccctctctccaacaaccctccttctgactctgagtcctccccatcaccaccccttacccactctcaggccaagcagccagttcccttgttgcccctttgggaagcagcaggggccaaagggatcgtctgtgtccacatccccttctccctttccgatctcttccaagttgaaaaatgtctcggatttttctcctccgatcctgatacctatatcaaagaatgtacgtatcttactcagtcttatgaactcacttggcatgatctctatattatcctgtcttttaccctccttctggaaaagaaggaaagagtgtggctcgcagccccgacgcgtgctgatgatctccatcagcaagattttaccaagcccataggagccgctgcagtaccctggcaggagcctccttgggagtaccaacccacagaccccagcctggcatcccataatcatatgattacttgcctcattgcaggcctaaacaaggctgcccacgaggctgtaaactttaaaaagctcaaagaaatctcccaaaagatcaatgaaaaccttgcccaattttttttcctgtcttatggaggctctccaaaaatatacccatgttgatcctgcctcctgagaaggtgctattgttcttcatacccattttatcttccaatctgcccccaatatttggcacaaacttaaaaaggctgaagatggccctgaaacccccaacaagacctccctaatctggctttcaaagtcttcaataacagggatgagcaaaataaattagataaagcctaaagagatcttgctaaataccagcttctagcagtggctatctgccaacctcgccatagtacccaagggcacaaaacacccaatagcattaactctcccaggccttttttaaagtgaagcaaagaaggccactgggcatgagcatgccctaatccatgaatgccaaaaagcccttgcccagtctgccagcagacaggccactggaagtctgactgtcctgttaacaggcagacagaaaagcctgtactgcaaaaccaccacccttttggagagacaaaaggtgaagtatcacttgcattcccacagctccttagtctagccactgaagactgacgaggcccagggcccctggccccatctaccttcactgcatcagagcccagggtaactctactagcagcaggtaagccgatctcttttttaaatcaatactggggccacctactcaactatgcctgaattctcaggaccaactcatccctcccaggtctcagttgtaggggttaatggactcatctcgagtccacgcaccaccaagcctcttacctgttccctatttcataccgttttctcacacccttttcttatcatgccctgttaccctaaccccatcctaggcagaaacctcctaaccaaattaaaggcttccattaccttcctctgttccccacaaccagactctcacctactcctttctgctactgaaccagccctgggcccctctccccagtatccactctcctcttctctggttaatacaatagtgtgggatactactaccccttccctagctacacaccacgatcctatcaaaatccagctaaaagacgcctccaaattccctaacatctctcaatatcccatctcagtagctcatcaaaaaggcttacagcccatcataaacaaactccttttgcgcagccttctcagtccaactcattctccatataatacccccataattcctgttaagaaggcaaatggctcctatcaactagtccaagacctctaggctatcaatcaggcagtccttcccatccacccaatagttcccaacccttatacactcctttcccttatcccttccaacacaacctactacactgccattgatctgaaagatgccttttttgctattccctttcaccctgactcccgagatcttcttactttcacctggactgaccctgaaaccctccagtctcaacaacttacttggaaagtcctccctcaaggctttagagatagtccccatttctttgggcaagctctggcccaagacctcacatcgctaaacctctccccttgctggctccttcagtatgtggatgacctcctcctctgcagcccctccctaaaagactctcaaacccacactactgcccttctaaacttccttgctgataaagaatatagggtttccccctctaaggcacaactctccaccccaacagtaacttaggagtccaactctccctcagagcccaagccatgaccccagcacgggagatagacagtctacgtccacccttctccaaaagagaaatcctttctttcttagaactagcaagatccctaattttgccctcctagcctgccctctttatgaggcagccaaaggccctccaaatgagcccctaaatccttcacacaacataatccccagcttcctcaaactaaaggcagctcttgtaactgcttctgctctatctttgcccaacatctctcagcctttcaccctctacacagctgaaaaccatggaatagcccttggcgtcctcggtcaacaaaaaggaagtcctccttccttcactcctatagcttacctttctaaacaactaaacaacaccatctgaggatggccagcctgcctcagagtcctagcagcagccaccatgctagctttagaaagcaaaaagctaacattcagccaagacatcaccatatatagcccacataatctacaagatcttctctcctcccaagtactgagcaccttttctccttcccacatccaactactccatgctctttttcttgagaatcctgaattctgcctctccaaaaatgctcccctcagtcctgcatctctacctccagtgtcttcctcttctcccatccactcctgtactgaaatccttgatcacctgctgcatcattttcccaatatctccccggaacctcttcttgatcctgatgaccagttatttatagatggctcctcctccaagtccgtcaattccaataaaattgctggatatgcttgacagagtagttaaagctaagcccctaccccctggaacctcctcccaaaaggcagaactcatagctctcactagggccctaaccctctcaaaaggcaaacgggtcaacatttttacagactctaattataccgatcacattcttcattctcgcaccaccatctggcagaaaagagattccttactgccaaaggaacccccgttaaaaacggcccccttatttaccagctcctccaggctgcatgcctcccaacttaggcaggggttatatactgtcagggacgtgaaacagtatgagacaaaatatcaaaaagggaatagaaaagccaacgaggctgcaaaagaagcctccctctcatcagcccctgcccctgtcctccttgttaccccagcaatccaacccaggtactcccccaccaagaaggctttgctactacagcaagaagcctcctttcaaggggactggataatcaaaagtcaaaagctcatcctcccccaagaacaaaccaaataaattctaacatctcttcaccaatccttccatatcggtgcacacttcctgtacctactcctttgcccttatttctcctccccccacctattcatctcactaagacacataacctcaaactgtcatatatgctctgttacttcctcccaaggggccctccgctctcctcctattcctacacatcagctcagaggaacactcccagaggaggactgacaggtagacttcacccacatgcctcccgtcaagaagacaaaatttcttcttactcttatagacaccttctctgggtgggtagaggcattacgtacctcttcagaaaaggccgcagtagtctctcaaatccttacaacagaaatcatccctatatttggtctccctcactccatacaatcagacaatggccctagcttcatctcccagatcatccaacaggtttttcagtcccttggcgtccagaggtgcttccgtatcccataatggccccagtcatccagaaaagtcagaagggcaaatgggatccttcaggctcagttaaccaaactcaagcttaaagtccaaaaaccatggacctcccttttgcccatagcactggcctgcatcagagcaagtccgaaatcacccttcttccttagcccatttgagttaatgtatggacgccctttcctcttacaaaacaggcctcctctcgactcccagctaggagaatatctcccaaccttctcccttatccgtcatctcctctgtgaatgatcaagccctcccaaaaccccacaaaggccccactgactggactctcctaccaggaaagtatgtcttcctaaaaactcttaacccaacaaggctaaaaccaaggtgggaaggcccttttcaaattatccttacaacccccactgcagccaaactcaggacatgcctcttggtaccatctttccagagtaaaaagggctcctgcagtgcctactgaaccacagactgtcctccaccaatcctccagcaccctcctttgtccaaccaaactctgcctgacgcccatccctgaagaaggcccacgagcggtaactcttttacatatcacttctgcccctgctacagatgccaaggtcctcgtgacaaggaacagcctcaccctacagcataccaaatattagaatccctctcttctctccccatttccacatgaggaaaagtcttaacccacctataccttgcccatctgcaaggagaatttgaccatccatgggacgctatcagccacctcatagaccccctagaagaagccacctccctgtatggatcctaccagctcctctctccaacaacagattctgattcttcctcagattcctaattcttttgacagccagccccatggcctctacctcctcagggtcccttctcacttctacaagtctcgaatgatctctcaacctcactcactttttgttactgtgctccaattcaacatttgcttccagtttctggacctatttttgcctttcctctactgcctactcagctatcccaatttcttagccctgagaccattttcccattcacttctcttacaacatccaaaagggacctgcctttgtagacagagccctcactctcactggaaactatcccactgccctcactgacagagctaccaagctcctcttcaatctatattgccaactatgatgactcaaaactcccataccccaccatccaaggtctcataactctccataccacaagacttggccaagcccccttatgcatcacctcttccaatggacacgtacacgtaggcaccctccttccctctgcctgtaactcaacccgaaccatctctcacccttcctcccatatctcactctgagtggattattcagtctcccctgaagtcaacggtctctttactcagcccttctgcatttcctccctcccacctctcaaacatggaaaccccttccttggacaggagtgctcaaaggggtttctgtctctttctcactctgggttgctgaagctgagccaagtccctccaagtggggaacctacaaactgcaacacctactctcaatccacctgtctgtttgcataaatacctcaggcatcttctttctctgcgggtccacaacatacttctgtctccttactaactggacaggcacttgcgccctagtctgccttactcccaacattaacattgtcctttcaaaccaggaactccctgttccagctacaatacatacccactcaaaaagaacaatacagttgattccctattcacaatagcaaagacatggacaggccctaaatgcctatcaatggataaaggaaacacggtatggtcagacgcggtggctcatgcctgtaatcccagcactctgggaggctgaggcaggtggattgcctgagcttagaagtttgagaccagcctgggcaacagggcaaaatcctgtctccatgcaaaatacaaaaatagaaattggccaggtgtggtaaagcacatgtgtagtccccccacaccaagtacttaggaggatgaggtaggagacaattgcttgagcctgggaggttgaggctaaagtaagccaatatcatgctatgacactctagcctgggccataagtgtgaccctgtctccaaaaataaaataaaataaaagatttagtaaaaacaaaatatggtacataaacatcgtggaatactctgtggccattaaaaaaagtgatcatgtcctttgcaaaaacatcagtgaacctggagaccactattcttagaaaactaacggagagcctgggcatggtggcttgtgcctgtaatcccagcgctttgggagggaggtgggcaaatcacctgcagtcgggagtttgagaccagcctgaccaacatggaaaaagcccatcactactaaaaatacaaaattagcagggcatggtggcatgcacctctaatcccagctactagggaggctgaggcaggagaatcgcttgaacctgggagacgaaggttgcagtgagccaagattgcaccattgcactccagtctgggcaaaaagagtaaaactccatctcaaaaaacaaaacaaaaaacaacaaaaaaagagaaaactaatacagaaacagaaaaccaaatgcatgttattatttataagtaatagctaaataataagaacacatgaacacaaagagaagaacaacagacactgaggcctagatgagggtggagggtgggaggactaagaggatgagaaaacagacctgtttggtgctacgggtagtacctcagtgacaaaataatctgcacaccaaacccccatgacataattttagctgtaaaacaaagacacatgtatatcccgaaccaaaaataaaagctaaaagaaaaaatatccctggatggcagagtgcaatgtagctgaaaggactgattttcactacagatagtggcccaggtggggctgtactgatttatttctgtgtgaatgcaggcagatgagatcatgaacaggtggcccagaagcttaggttggtggagaaaacaagttgctgctgcagattcagtgtctgagggtggggatatgccagaagacttgtagacacttgtgggttcttggcaagaaacactaggatcaaaaatgcagtggtgaagttcctgagggtggtgcctagtcctgggaggagtgtggacacatcaatgtctagtgtgtgtgtgtttgtgagtgggtggaaatcctgtggtggcagatgcaagacaggggtgtctgttcttagaggtccttttctctaagttttcagtcttctgtcaccctgggagaagacctggaatcacaggaaaatgggcagtgtgacagcctgtgtacaggagagcagagcctcccatttccagaaacccagagttttactccaggccaggcctccataatatctttttttctggcaccaaatctgtagtttgctgaacatcaaactatcctccaacaccaactcattgtctaacatttgaattctgacaccacccagagtcagcacagaccctgattcagggctcggtcccacaacactgtcctcactgcagatgccagccacaaaccccacaggcccatctatgcttcggagccactatttaaaaactggggactcccatcgcctccctgaagttcaataatttggtagagctactcgcagaactcaggaaaacactgtagttatgtttactgttttaatatataagatgcagcccaggaaaagccaagtggaagaaatgcatagaacaaagaaaagagatgggggaagatgaaacacatagataatcctggaaaatatttgtgattaataaaattctccatcctttgtgtgctccaggaacagtttatggaaagaaacactcttcccattatgacttagatagtcctctgttttacctatcacacagccagacacacactctgcagattttctcctttttctcattagaaaaatcagctgaatttgtcttcagtgatcaaaattattatttttttttaatggagtctcgctttgttgcctaggctggagtacagtggcttgatctcggctcactgcaatggctgcctcctgggttcaaccaattctccttcctcagcctcccgagcatctgggattacaggtgcccactgtgacacctggctaatttttgtgtttttagtagacacaaggtttcaccatattggccaggctggtctcgaactcctgacctcaggtgatccgcctgccttggcctcccaaagtgctgggattacaggcatgagccacctcacttggcctaaaataaaatatttcttaatcaaatttaagcttatatccctcccttaggctcctgaactttgagctaccctcagtctgagtcaacatacaaccccattttatgtccctcctaagagcatgctgatttcagggtaacacattctctgatctaaaatctgactttttcaccctccatttgccattcccctcccacctactttctaatcttgtttgctcctccctaggaaagaaagcccttttcagcctacatctttgcaagccacaaagaccttccttatagttagttggtacttcctcctgttgcaataattttttggaattttttttacataaatctaacatttttattttacacagtctaaaaaatgcctcaaaacagtaacaacttcatcatcagtaagaacctcccagtttcctttcaccttaatcttaactgcatctgcctgtggggccccagctttccagggctctgtagcttctctcagaataaaggatccttccatggctggggtgagcaggctgggacatctgcagtggagactccccagaaaaaagtaactgggcctttaataaccttctgttggccgggctcggtggctcatgcctgtaatcacagcactttgggaggtcgaggtgggcggatcacctaaggtcgggagttcgagaccagcctgaccaacatggacaaatcccgtctctactaaaaacacaaaattagccgggcgtgatggtgcatgcctgtaattccagctactccagaggttgaagtaggagaattgctttaacctgggaggcagaggctgtggtgagccagatcacaccattgcactccagcctgggtgcacagacacacacacacacacacacacacacacacacacaccaaaaacaaaaaacaaaacaaaacaaacaaccctctgttgcaggcttaatattagccttagcttggaatcactaggttcaagctttaatttccatgtcagagttattcactttgtttttgaaagtaagtgtttgaaaattccagtgaaattactcaaacacagtgtttatataagggaaggaaattttaagatgcttactttttttttttttttgagatggagtcttgctctgttgactgggctgaagtgcaatggcatgatctcagctcactgcaacctaagtttcctgggttcaagcaattgttgtgcctcagcctcttaagtagctgggattacaggtgcttgccaccatatccagctaatttttgtatttttagtagagactcagtttcaccatgttgaccaggctggtctacaactcctgaactcatgatccactcgcctcagcctctcagagtgctgagattacaggcgtgagcctccggggatccgacgcacaatcccggttggcttacccttaaactttttccaaatagggtaaactcgtgattttgcgagaaaaggagaaggggaaagaagaagggatagggttgatttacagcttttacaacttatgaccaggaagttgtctttgaagaggaacttcgttgtcccaacaactccttacctcaagtgatccacccaccttggcctcccaaaatgctgggattacaggcgtaagccacctaggctcgccccataaatttttaataggagaaaagagaaactgtcaaccccatggtccaaagctcttcccattcatggacccgcaccccgagtcaggattctcccctgaccaccctcccgtggtccctgcacaatctgggagagacgccacactgcaggcgcagagctgcccagacagggctccaggccagggcacagtcgctgcacagggaagaggcaggacacccaggtgtggggaaaaggaagagagatcagatcgttactgtgactatgtagaaaaaggaagacaaaataaactccattttgatctctagtaagaaaaattgttctgccttgagatgctgttaatctgtaactttcgtccctaccctgtgctcacaaaaacatgtgctgtgtagactcaaggtttaatggatctagggctgtgcaggatgtgctttgttaaaaatgtgattgcacgcagaatgcttggtgaaagtcatcgccattctccattctctattaaccagagacacaatgcactgcggaaggccgcagggacccctgcccaagaaagcctgggtattacacaggtttccactgactgagatagcctgagatatggcctcatgggaagggaaagaccttacagcccccaagcccaacaccagtaaagggtctgtgctgaggaggattagtgaagaggaaggcctctatgcggttaagaggaaggcatctgtctcctgcatgcctctgggaatggaatgacttggtgtaaaaccgaccatacattctattctgagacagaagaaaactgccatatggctggaggcgagacatggtggcggcaatactgctctgctactttttaccacaatgagatgtttatgtaaagttaaacataaatctagcctacgtgcacatccaggcacagcaccttcccttaaacttatatatgacacagagtctttcgcttacgtttttctgctgaccctctccccacattcaccctatagttatgccacattcccctcgccgagatagtaaagatagtgatcaataaatactgagggaactcagagaccagcgcgggcgcaggtcctcacttgctgagcgccatccactgggcccacttttcttcctctgtactttgtctccatgtcttatttcttttctcagtctctcatctccaccttgcgagaaatacccatgggtgtagaggggcaggcccccttcacccgggattctggctgtcagcacagctgccgtcttatggctgaaggggactgaggccaagctgggcaaggagaactcgggcgcagattgtggagattactgtggggaggcctgagtcccgccacagccacatcaccccggttccaactagcccctccctcactctcaggatgtcggactggcactgtcactgtttctaggcttccagggggtcctggagtcttagctgtggatctcccaaaacctgcaggtcagagggacacagagcctgggcctctaggagcagacgacacagagtagtgaagaccagacctggagctcccgctgcagcgagagacaaaggccccaccaaacccagaagtcgtcctgttcgcttcagcttcatgcctgatttgaggatttcctgcccagcgtccctgactggataatgcttaaggctccgccccttcaggccctgagtgacagaagatgtcatcagatgctgggctgagtgaagaaagactgacaacctaagctgcagccttttcaggcagggtttcctccctgagctgagccaagcccaccccagagcttggggaaattctctctcttctttactctctctttttgaatttattcaaaaggtgaacagaagtattttgctttcatattaataatacataaaatttttgttcaagagaaaatcaacttttactttggtagtagtgtattttgaatactaaagctaattttaataaaccttataaataaatcaaatttgtcatttttgacctctcaagatttacatatatattttgtaatctcttgtaattttttaaattttttctattttgtttttacctatattctttttattatttcaattcaaaacaacctttaagtaatttcaaactgttataggagatagaaagaagtcatttagggccagccacggtgactcacgcctgtaatcccaacactttgggaggccaaggtggacagatcacttgaggtcaggagtttgagacgagcctggccaacatggtgaaaccccatctctaccaaaaatacaaaaaattacccaggcgtggtggtgcacacctgtagtcccagctactctggaggatgaggcaggagaatcaattgaacccaggaggcagaggttgtgtaatggcccaaggagttcaccttgccctttgcctagacagagccaattaatcaagatgggggaatttgtggaggaaaagttaaatattaaatttgaacttaattgaacatggacacaaacaatagtcaacaagtcatggaacaggttgtgtgagccccttgaggcattcatccagcgctgttttggagaaatctctattttaatctattcctatacattagttattgaaaaacaatagacaatcgcaaaaaaagttgatcttcttgtgtttcttgagcccagtcgtgaagggccctcgtgactgggcctcatgccaaacaactcgttacaaaaagagctaggatcccagactgcaccgaagttttgtgagacctctccttgtctgtgcacggatggctggatgactctggagcccaagctgttgcttcccagtctggtggtgaaccctccatagtccgatgagtgtggtgtccaactctggagcccagcctgttgcttcctggtctggtggtgagtctccatagtctggtgtggaggcaaatttgaatattaaatttgaactaattgaatgtggacacaaacaatggtcaccaagtcctggcacaggttgtgtgagcccattcaggggttcatccagtgctgtttaggagaaatctctatttcaatctattcctatacattcgttattgagaaacaatagacaatcacaaaaacaagttgacctttttgtgttccttgagcccagtcgtgaagggccctcatgactaagccccatgccaaaaaacttgttacaaaagagctagggtcccagactgcactgaagattcatgagagctctcctcttctgtgcacagatgagtggccgactctggagcccaggttgtttcttcccagtctggtggtgaatcctccatagcctggtgagtgtaaatatatatatatctcttttccattctcctcttcccatcacaatttgcttattatatcaatctgcttattatattgatttgcctattatatcatttgcccattatatcatttgtttattatatctgtgtagggtccagccccatagggttggtgggtttttctccctgtgtgcagagatgagagagtgtagaaataaagacacaagacgaagagataaaagaaaagacagctgggcccgggggacaactactaccaagatgcagagaccggtagtggccccgaatgccaggctgcactgatatttattggatacaagacaaaggggcagggtaaggagtgtgagccatctccaatgataggtaaggtcataagaatcacgtgtcctttggacagggggcgctttcctgcctggcagccaaggcagagagagagaggtgagagagagacagcttatgccattatttctgcttatcagagacttttagtactttcactaatttgctactgttatctaaaaggcagagccaggtgtacaggatggaacctgaaagcagactaggagcgtgaccactgaagcacagcatcacagggagacggttaggcctccagacaactgcaggcaggcctgactgatgtcaggccctccacaagaggtggaggagtagagtcttctctaaactcccgcagggaaagggagactccctttcccagtctgctaagtagcaggtgtttttccttgacactgactttaccgctagaccatggtccgctcggcaacgggcatcttcccagatgctggcgttacccgctagaccaaggagccctctggtggccttgtctgggcataacagaaggctcacacttgtcttctggtcacttctcactatgtcccctcagctcctatctctgtatggcctggtttttcctaggttatgattgtagagtgaggattactataatattggaataaagaataattgctataaactaatgattaatgatattcatatataatcatatctaagatctatatctagtataactattcttattttatatattttattatactggaacagctcgtgccatcagtctcttgccttggcacctgggtggcttgccacccacatatctgcattgccatttatgtggtataaggcttgttacccttaaaagtattgtgtgtatcttttcttctcctcttgcatgtttcccacccagaacatttttggtgtcacaaacaggatttgaaaacaaaaggtgcaggttttggccagaaggacagggctggaggcttggggacttcccatatatcgggatgggaactccaccagttctcccccatggcaaccgaatggtcaaggggaactggcctttgtgggaattgagaattaaattagtgcaatttaaacctttgactgtgcgggaagtgctgcaggagattccagtcagcaaaggagatgctgagggatcccctggagtcgatggtgtttgcttactgctaataaattaatgtatcaagagaggggctggttgctacaagatattttaagttggaaaagaaaaatgctagtgtgatttccagactggccctggcccaatgccaggcctatatcttgactgatcaggctcaaagctatcaccctattactgaaaaaagcagccgtccgaatggctcggttaggttaaaactgaagagctagtttgctggggcttggagcaggtaaaaacccagctcctacctccaggatgggaaattaaacttagtaaaattcaaggacctgcataaactgtaaaattccttggcatcctatggaatgcagagatatagtccattttacaaaaggctaaggctaaaatattagaatttgcaaaccctactacttaaaaggaggcccagacatttattggctggtttagattctggagacatcatattccccacttgggtaacattttacaacctctgcatgcagccactagaaaacgctatgactttcactggggaaagaaggagaacatggcttctgaacaagctaaatgagtgggtcaactggccctggatctatggcccatacaggatgggccaggagaactgcaagtaactgtcctagatcaaaatgctaattggagccttaggcagaaacaaggtgggaagagggtacctttcaggttttggacccagaaactgccagaggccggaaaagcttatacccctttcaagaagcaattgttagcttcttattgggctttgctggaaacagaacacctctgcttcaaccatgatgtctttatgaggcccgaaactcctattatgacttggctcatgagttcccccaaaacccaccagatagggcatgcccaagaaggagcatcataaaatggacgtggtacatacaagaccaggctaagccaaaaccaaagtgggtatcacttttacatgaggatgcacaaaacctgccagctcaggaaatcatggagcaagtcctgcaggtagggaaggaaatcccctcactcccacccagtggggcaaatcctttgaagaactaagcccagaggatcagaaacatgcttgatttacagacggatccgccaaatacattggtgggacctgatgctggaaggctgtggcttataatcctgttaaaaacataaaaatttctgatgaaggaaggggtgggagcagcgagttagctgaactagtagccatccttcaagctattcaggaggaaggcagagggatttctcacttgtataccaaatcttggtcagtaccaaatggtctttctacctggaagccccaatgacaatgaaacaaatggttaattcagaataaagaggtttggggacaacaatacttggaagatatctcaatccattgcacactgccattatcactgtttcactgttatcactgtttcaacaaggtttcaccatgttggccaggatggtctcgatctcctgatctcgtgatccgcccacctcagcctcccaaagtgctgggattacaggcgtcagccaccatgtgggggaaagaaagagagatcagactgttactgtgtctatgtagaaaaaggaagacataagaaactccattttgatctgtactaagaaaaattcttctgtcttaagatactgttaatctgtaaccccagccccaaccctgtgcccgcagaaacatgtgctgtattgactcaagatttaatgtatttagggctgtacaggatgtgctttgttaaaaatgtctttgcagacagtatgcttggtaaaagtcatcgccattctccagtctcccgtacccagggacacaatgcactgcggaaagccgcagggacctcatgcccaagaaagcctgggtatcgtccaaggtttccccccactgagacagcctgagatatggcctcatgggaagggaaagacctgaccatcccccagcccgacacccataaagggtctgtgctgaggaggattagtgaaagaggaaggcctctttgcagttgagataagaggaaggtatctgtctcctgctcatcgctgggaatggaatgtctcggtgtaaaacctgatcatacattctatttactgagataggagaaaatcaccttatggctggaggtgagacatgctggcgacaatactgctctttacgacactgagatgtttgtgtaaagtcaaacataaatctgtcctacgtgcacatcaaggcacagcacctttccttaaacttatttatgacacaaagtcctttgctcacatgttttcctgctgaccctctccccaccattaccctgtagtcgtaccacatccccctcactgagatgaaagagatagtgatcaataaatactgagggaacttagagaccagtgccgggtgcgggtcctccgtatgctgagcgccggtcccctgggtccacctttcttcctctatactttgtctctgtgtcttatttcttttctcagtctctcatctccaccttgtgagaaacacccacaggtgtggaggggcaggcccccttcaccaccatgtgcagccctgttttccatgttgatgcccatgcatctctgctttctcttgacaggctatttaatcagcaggaagaaaaacaggccacaatttccaccataacagtaaacttgaatgtggatgaatagattacaatgtgttcaagccttgcaaagagaggcattatagtgtatggtggtgtaattgatagtgattaccagggagagttaaaggtcattttatacaataacactccagattcttttgctataaaactagatgctggttactcaatttttagtggtacccttgtcaacaattaactcctgaggaaatctctgccccaacagagtctacatacagaactgggggattcagatcccctggtacaggtagcttaaatcctggagccaaaatatgcatacagcgtccatcacatcttgaccctaaggctggtgaccttgtagctatgaaagcgggaaatgaaggcatagtacaatttcctaaagatgaaaaataaatcatgttccactccatttttgttattacagggaataacctatctactaatggtcagcacctgtgtctttgtgtctgaagccaagaataaattcatcacctgggtagccaccgctgcaactgaagccatccacagtcaatgttggctatatgttgagttgccggaggctgcctgggatgggctatcttgaagaatcgtccctgacaacatttctgaatggctatattgttaccagtagggccacaacaacaacaacacttgcaatccaacctgggcttcctttcaccacactaagcaatctatctttgccaggtcagacaaaagatgaactccaccctcaccttgcatcaaaagtcttgatatcttgcccaataatcctggaacaatatacactgaaaacctgctgtgctggtggctggattccatacaggcttcgctttttctggaggccttaaatggctcctctaatgtttctttggggtttcttcagacatttgtcaacacatactccaaatcaacaacactgccccccaatgaaccacaatctctttcctattttaataacacattagtacactatgattacagtagctccattgctgtcccctggggggccctctgggtatgcagatcctatgggttgcaatactgtccctgcattggatgggaagatgcacttgagggtggacattaattccattcactatccgggataatattcccttccccagtaatctagatgcttacaaacaccactggttacaaatgtgctggtctccctggtggtggtaccctatcacagtattctcccctgccaccagtacattcctccttcaccaacacattaaaatatttaccttacatgtagaaaaagctcttaatgatagtagcactgaacttgtgttgttatcagatgaatttgctcagctgcgtactattgtgttgcaaaatcaaatggcattaaaaatgcttaccgcagcccaaggaggggtttgcacgttactgcaaactgaatgttgtgtgtatatctctggtaattctcacaatatgactctccttggaaagccatgctgagtgtggtttttattaattgtgcttttaattctcctgtgttaccctgtatctgtaatctatatcaattatgccttttccatgtatctgagagggtattttcctacaattgagtatccaattgaggccaaatgtggagggaaagttaaatattaaatttgaactaaattgaatgtggacacaaataatggtcaccaagtcctggcagaggttgtgtgagccccttgaggcgttcatccagtgctgtttcagaaaaaaatctttatttcaatctattcctatacgttagaaattgaaaaacaataggcaatcccaaaaacaagttggcctttttgtgttccttgagcccagtcacaaagggcccttgtgactgagcctcatgccaaacaacttgttacaaaaagagctagggtccaagaccgcaccaaggcttcaagagacctctcctcgtttgtgcatggacgggtgaccgcctccggagcccaggctgtttcttcctgctgtggtgacaaatcctccatagtatggtgagtgcggtgtctgactctggagcccaggctgtcacttccctgtctggtgacaaatcctccatagtctgatgagtgtaaatatatatacatgttttttcccttctccccttcccattgcaatttgcttattatatcaatttgcttattatatgtgcatggccatttacatggaataaagcttgtttacccttaacggtattgtgtatgtgtcttttcttctcccctcatgcatttcctacacagaacaccatatttctcagaggctttgtttgctccttttaattcttttttctgtaaacttgtctgcatgcctcatttcggcaaggtggtcttcaaactctgatatcctttcttctgcttggtcaatttggctattgatactttcgtatgcttcacgaagtttttgtgttgtgtttttcaactccatcaggtcatttatgttcctctttaaactggttactctatttagcagttcctctaaccttttatcaaggttcttaacttctttgcattgggttagaacatgtttctttagctcagcggagtgtgctgtcacacatcttctgaagcctacttctgtcacttcgtccatctcatcctctgtccagttctgcacccttgctgaagagacattgtgatcatttggaggagaagaggcacttgggcctttcaggggtttttgttgattctttctcatcttcatgagtttgtctagtttccatctttgagactgctgacacttggatgagtttttttgttctgttttgttttgttttgaaatagagtctcactctgtcacccagtatggagtgcagtggcacaatcttggctcactgcaacctccgcctcccaggttcaattgattctcatgtctcaggctcccaagtagctgggactacaggcatgcaccaccacggcagtctaagttttgcattttttagtataggcagggtttcactatattggccaggctggtctcgaattgctgacctcaagcaatctgcctgcctcggtctcccaaagtgttgggattacaggtgtgagccaccacgcccagccttggatggggtttttgtgggtatgcttttgttgttgatgctgttgttgtttcttcctgtttgtttgtttttctttcaatagtcaggtccctcttctgtagggctgctgcagtttgctggggggtcacttcaggccctattcatctgtttcactcctgtacctggagatgtcactcaagaagtttcgagaacaacaaagaagggtgcctgctcctttctctgggatctctgaactcaagaggcaccaacctgataccagtaggatcgctcctgtatagagtgtctgacaacccctgctgaagggtcacacccagttgggtggcatggggagcaaaacccattaaatgaagcactttgactgttccttggtggaggaggggctttttgctagggaaaatcccactcgtctgggctgcccgaattcctcagagcaagcaggaggaaaggctaagtctgctgattcacagaggatgcagcctcttctccccctaggggctcaggcccagggagatcacagttctgtccctgagcccctggctggagctgttggagttcctgctgggaggccctgcccagtgaggagggatgggtgagggtcaggcctgaagagacattctggctgcagtcagccacagccggtgtgttgggctgtgggggacacctcttgagaccaagctgtccagcctccctggctctagcaggggaaaagtgtggtcaggagctatagatatggctgctgcctttccccacccagggatcttagcctgttaggcagttgtgagtccccgtgctggctgctgtccctcccccaaggagctcaaacagcttagacagcagcaagccacagctgtggtgctggtcgtccctccactgggaacttagcaggcttaagcagattctagctgagaggctgttgagaatctgctcagctccagggttgtgtcaggcacagtaagttcctcttcaaagggtaacttccttgttctttgttctcaaattcaacttccttgtaccttcctgctcctaactacctgctcttcctgccagtaaacaactcttccagccagtcccaatctgtaacccacatctcttcttatttggaagaagtcctcctcactcctagttacctgctctgtaaacaaacttcccgcctttctctatttagccaatccagttagtttagattgtgcagtctgactccagccaatggggacaggacacagaagtagggactgcattagggataaaaaccccttccctctcttgtatggtgtgctctcacaacagccagagacatgagcagcctcttctgcagaagtaaatttgccttgctgagaaattcgttgtttgagtgctcattttctttgtgactccaagctcttgtttccaacagttggaaccttaggctccagtggcgtgggttcacaagttgaatcttctaatcagtgggattcactgttccatagagaaagcgcagtttcccagactgagtagcctgctcactcactgccccccttggctggggctgggggctccccagccccatttggctgtcaggtgggttgccacaccacactgcttttccttcctctccatgggtcacaccagccacctagtcagttctgatgagagaaactggatacctcagatgtcagtgcaggattcacatgctattatggttcttttctatgggatgctgctgctagtcagccatcttggccccacccccaccaatttttctttgaatgtctgatagagttcagcagtgaattcatctggttctgaacttttgtttttgcttggcaatttgtgaaattattatttcaatctcactgcctgttattagtctgttcagagtttgtttttttaatctaggaggattgcacatttccaggaatttattcatctcctttagattttctagtttttgcatgtaaatgtgttcatagtagccctgaatgtgatcttttgtatttctgtggcatcagttgcaatagcttccatttcatttctaatggagcttatttggatcttctctcttcttttcttggttaatgctgttaatggcctatgaattttatttatgttttctaagagttagcttttcatttcatttatcttttgtattttttttccgtttgtttcagttcatttagttctggtctttcttttcttctgctaggtttgggtttgacttgtttttgtttctccagttccttgaggtgttatcttagattgtctacttacgctctttcagactttttgatgtaggcatttgatactatgaactttccttttagcactgcttttgctgtatcccagatgttttgataggttgtgtcactattatctttcagttcaaagaatttttaatttctatcttgatttcatccaacgatcattcaaaaatgggttgatcttaagtttaatgttttttccaaaatttatttaattttcaagtatttgcatggttttgatggttcatttggagttgattttcaattttattacactgtagtctgagagagtagttgatatggttttgattgtcttaaatttattgagacttgttttgtggcctatcatatgtctatcttggagaatgttccatgtgctgatgaattaaatgtatattctgaagttgttgggtagaatgctctgtaaatatctggcaagtccatttcttctagggtatagcttaagtccattttttttttgttattgttgactttctgtcttgatgacttgtctagtgttgtcagtagagtattgcagtcccccattataattgtattgccatctatgtaatttcttaggtctagtagtaattgttttataaatttaggagctccagtgttaggcgcatacatatttagaattgtgatattttcctattggactagtttctttatcattacataatgtccctctttgtctttttctttttgactgtttttgctttaaagtctgttttgtctaatgtaagaatggctactactgctttcttttggggtatatttgcatggaatatctttttctaaccctttaccttaagtttaagtgagtcgttatgtgttgggtgagcctcttgaagacagtagatatttcgttggtaaactcttatccattttgctattctgcatcttttaactggaatatttaggccgtttacattcaacgttagtattgagatgtgaaggactattctattcattgtgctagtcattgcctgaataccttctttattgtgttattgttttataggccttgagagatttatgccgtaaggaggttctatttcattgtattttgaggttttgtttcaagatttagaactccttttagcagttcttacagtagtggcttggtagtggtgaattctctaagcatttgtttgtctgaaaaagactgtatctttccttcatttatgaagcttagtttcactggatacaaaatttttggctgatacttgttctgtttaaggaggctagacagaggaccccaatcgcttctagcttgtagggtttctgctgagaaatctgctgttaatctgatatgtctttctttataggttatctgatgcttttgtctcacagctcttaaaaatctcttcttcatattgacttcagataacctggtgactatgcgcctaggtgatgatctttttgtgatgaatttccttggtgttctttgaacttcttgtatttgcatgtctagatctctagcaaggccaggaaagtttttctcaattattccctcaaataagttttccaaacttttagatttctcctctaccttgggaacaccaattattgttagattttattgtttaacataattccaagcttcttggaggcttagctcatttttaaattcttttttgtttgtctttgttagattggaatattcaaaagtcttgtctttgaggtctgaagttctttcttctacttgtttggttctattgttgtaatttcccactataatttgcatttctttaagtgtgcctttcatttccagaagtcatggttgttttctatttatgctatctatttctctggagatttttttcatccatatcctgtattttttaaaaatttcattaagttagtattcacctttctgtagtgtctctttaagtggcttaataatggaatttatgaattctttctctggcaattcagggatttttttcttggtttggatccactgctagtgagcttgtgtggtcctttgaaggtgttaaaaaaaattcttgcttttggccaagcatggtggctcacagctgtaatcccagcactttgggaggctgaggcgggtggaacatgaggtcaggagatcgagaccatcctggctatcacggtgaaaccccatatctactaaaaaaacaaaaagctagccaggtgttgtggtgggtacctgtagttccagctgcttgggaggctgaggaaggagaacggcatgaacctgggaggcggagcttgcagtgagccgagatcatgccactgcactccagcctgggcgacagagtgaggctctgtaaccaaaaaaaaaaaaaaaaaaaaaaaattattgcttttttatattaccagaattttgttttggttccttctcatttgggtagtctatgtcagaagtaagacctgaggctctaggctgctgttcagattcttttgtttcatggggtgatcccttgatgtgatggtctccccttttcccttgggatggggcttcctgagagtcagactgcagggattgttattgctcttctgggtttaaccacccagtggagctactggtctctgggctggtactggggagtatctgcaaagagtcctgtgatgtgatctgtcttcaggtttctcagccatggataataccacctgctctggtagaggtagcaggggactaaagtggactctgtgagggtccttggttgtaattcagtttagtgcactggtttttttgaatgcaggttgttctagcagtgaagttgtcacatggacagactgaagacttctgtgtagccaggatgttacaatgttacaggtggaattagctgttgttttctcctttattggagtgggttttttttttttttttttttgagatggagtttcactcttgttgcccaggctggagtgcagtggcacgaccttggctcactgcaaccttggcctcctgggttcaagtgattctcctgcctcagcctcctgagtagctgggattacaggcatgttccaccatgcctggttaattttacatttttagtagcgagggggtttctccatttttgtcaggctggtctcaaactcctgacctcaggtgatccacccacctcagcctcccatagtgctgtgattatgggtgtgagccaccccacctggcaggggtcattattttgtgagttactgtaagggcttgagttggttggcctccaacctggaggtggcagctttaagacagcatcagctgtggtaatatgggggtatgcaagcttgccaccaggtcacctggataagtattcatgtttttcaggcaatgagtgggaacatagagctcccaagagagtatgtcttttgtcctcagctaccagggtgggtagagtaagaccatcaggtgagggcagggttggacatgtctgagctcagaccctccttgggtggggcttgctgcagctgctgtggggttgggagtatggttctcaggccaatggagttatgtttccagggggattatggctgcctctgctgtatcatataggtcaggatggaagtgaaggaaagccagcagtgacaggcctcactcagctcccatgaagccagcaaggccagtttcactcacaccctacccaccaacagcatcaagtttatatccagttggtgagcagtactgagatcttgccccaggctataagcctccccattgagaaagcaacctgggctttcaggccccacccctcaccacctgccatggattctgtgcccatatctgtgcttcccattcactgtcccctcaccgattctgccaaggaaaattcacactaggtcaaaactattacaaagtttagctggcagtttccttctccctgtggttcttccccaattccactggcagcccgtcccaaggacccctgtgagataaagtcagaaacggcttccctgaggaccaagagtgcctgtagggctcttcccactgcttcttctacttttatattttgcttggctctctaagttcatttcggctctaggtgaggttaaatgcttctctggtgatctggattttcaggttttgagtatgtgtgtttagaggtgaatgttccgtctcttacacttttggcactttctgtttttcagttgtctcgcagaggttgcagtggcaagccacttctttcaaagagtctgtgcattcttttggttttcctggtatgtttctatggtagttcttggagcaaaagttcatgatgagagtctccacatgctgttctgtccatccaagtgggagatacaagttagtcctgtctcctagccaccattttttctttttgccttttgagagaaagatattgattgactcttcatcagagatttaaaaaaaactgttaagtaggacttctctctctttctttttcttttcttttttttttcttttttcttttcttttttttttttttttttgccaaggagttttattcttgttgtccaggctggagtgcaatggcacgacctcggctaactgcaacctctgcctccctgattaaagcaattctcctgtctcagccttgtgagtagctaggattacaggcattttgtatttttagtagagacagtgtttcaccatgttagtcaggctggtatcgaaatcccaatctcaggtgatccacctgcccggacctcccaaagtgctggcattacaggcgtgagccactgcacctggctctctttattgttttaaacagaactctaatttttcttcaggccactgatttagtttcttattatacatttatttatttatctgtttcttattgcctgtccccccaactagaccaattgcaaaaaattcaactgcagaaatataaggtaagtttttcatggatgattactcattaactataaatacataaaaattttatgtacacatttatctgagctgccctcatatggccttctacagaatgcttgaagttagattaaaaataatctacagataaatattcactgatagaatgcttaaagttgaagcctactggtgaaaatgttgttcctttctcaccagaaatgaagtagatacatttatttctggacttgctattatgcttcattagtgtgtgtttatttttatccagtgccatgccgtttgcttattgtagctttttttttttttgagacaaggtctcattctgttgcccaggatggagtgcagtggcttgatcatggctcactgtggcctcgacctcacaggatcaaaggatcctcctacctcagtgtctcaagcagctgagactacgggtttgtgccattattccctgctaatttttgtagtttttgtagagatggtgttttgttatgttgcccaggctggtctaaaactcctgggctcaagcaacccaccttggcctcccaaactactgggatcacaggtgtgagccactacacctggccttactgtagctttgtaatatattcagagaccaggtagtgtgatgccgccagctttgttctttttcctcaagattgcttaggctattctgggtctttcatgaattgataaagatttgtgaattactttttaattctgtaaaaaatataattggaatttttataaggattgcattaaatctgtagatcactttgggtagtatggacattttcacaatattaattctttccattcatgagcacggtgtctcatgaattttttagtgtcttcaatttattttattaatgttttagagtttttagtgtatggatcttttacctctttgaataaatttatttatgtgtattttattctttttgatgctgtggtaaatgaaattttaatctcaatccttgtctacacatctattcaactttaacagctttagagtttaaaccaaatacgtgtggcaatgcaggagaggaaagaaacccaaagttttatagttttgtaaaatacaggtgctcaatttagcatcctgtgttatgccctggggtgccaagcatcgcattaagctcaaacttaagctcagattgacttattctttgggataacccaaagatagaggaactcatcatccttattttacataggcagagatggccaggcgctgtgactcaccctgtaatcccagcactttgggaagccgaggcaggtggatcatgaggtcaggagcccgagaccagcctgaccaacatggtgaaaccccgtctctactaaaaatacaaaaattagctgggtgtggtggcgggcgcgtgtaatcccagctactcaggaggctgaggcaggagaattgcttgaacccgggaggtggaggttgtggtgagccgagattgcaccactgcactccagcctgggtgacagagcaagactccatctcaaaaaaaaaaaaaaaaaaaaagtacataggcggagatggctgcatagagagaataaataaatatacacaatcgcatggctggtacatggtaaactggaacttctagtacaggccatctgaccctgaacttcaaatgggctgggaagcttcttaccttctgtctatgaaaagaccagagatgccagagaatgccatttgagtctttggtgaataggtgaaaacttcaaatattgataatcaggaggaaggagttagattgacccactacttgatggaacacttatttttaacttaatgcagccatgaaagtgcttataacacttggggctttaagttcatcaattaaggcagaatttctatatagtatgcttttccctataaaatgtatttagccattgataactctatgtagttctgtggaatatgtgcttattagacagatcaggtgtttcggctaagaataagatgagtaactgtgttttaaaaatatatatttataaataattttaatcttgaatatttaataaccattaactactgtttgaatacgtctttgtccaaaacatatatatgtctatatacattctagataatatataatatgtatatatataatacatacatacatatataatcatatgtaatataactgtaccttctgtggctattatgagcttcattgctcgcaagctccaggatatggggcatcaggtactcaagagtggcagcaggaaacataagcatggaagagtccaggcactgggcacaggagatctcccacaagaggtgtccaaatataccaaggggaaccgtacgtagttctgctcttgctaagagtgtaaagtctgtttttttgttgttgttgttgagatggagtttcactctgtcacccaggctggagtgcagtggcatgatctcagctcactgcaacttctgcctcccgggttcaagcaattctcctcgctcagcctcctgagtaggtgggatgataggcatgcgccaccacgcccagctaatttttgtatttttagtagagacggggtttcactatgttggtcaggctggtcttgaactcctgacctcttaatccacccacctcatctgcacaaagtcctgggattacaggcatgagccactgtgcccggcctgaagtctgctttttatgtctatcagagcttcaaagtcttcttttcctagacatgggcttttgtgaatggtatagtttagatgtagtttgtccctgaaaaagactcatgttgaaatttgatcccctatgtggcagtgttgggaggggggcctcatgtgagattttaggtcataaatagattaatgctctcctgcagagatgagttctcactctcaaagtttccagcaagaatagatttttaaaaatctggctttctcaagtttatctcccttttgcttcacctcttgctatataatctttttgcacatacctgcttcccttctgctttctaccatgagtggaagtaacatgaggtgttggggtgatcagacccaacaccaggtcgtgggggtgacgaagtccgttggagtcaaaggactgagaaaaagacagtttgagagagaaagtgggaccagggggccatcacgagtgtggagactgtgaaggccccaagctctgggagcccatgctatttattggtgccaaacaaacaggtgatgaggatttgggggttgaaaggaaacagtgtatcaagtgaatgagaaacatatggctgcttgagataacgagagtgctagaagcaaggagccagcaagtctagcagacatgcaagccctgcctcagcttctctcccaacactcagcttttctcccaacatgaggctttcaccaaaagccaaacagatgccagctccattcctcttgtgcttcccagcctgaagaaccatgagctaaataaacctctttatacattacccagtctcaggttctcctatatcacaaaaaggactaaaccagtgagctttgcattaatcaacctgattttcaacctggccttggcctctcaagaccccagtgctcagtcacacccactatgtccatgtgggcctgtccttcactcatctttgtaatactctagacttttgaatgccactcatgtcaacttggccatgaactggcctaggcctagaaatgcccatgattagaatctagtcactctaatgactgaaccctctttttaaagaaactctagctattcaattgactttgttgtagaaaaaaatgtgtcatcaataaaatactttgccctgtctagaggacaccactacagattatcacactctagccagtactctctttgagtgcttttacaactttttctaaggtttaggtcactgaaagacattcacaatgtcttgtccagtagagtgtaaattgtttcttctctcacaatacaataatacgagtctccctccatttatatatttatttaaatatttccaatttatattgcttttgctgtatatttgaattttttttgtactggttatcatgtatgctgattcctcagaagttaaataaacattttaatatgtgtgcctatcttttgttgttatttagatatctaggtgactacagcttcagtagaaatttgttgacttcgttttgattttatttgcaattttcctttcggcttatttagtgtttctgtgtttttctgctgcatttacagcatattatctagtctttatcactggcaacagtggcttgaagtttgtttataaaattatgtttattgagatgaaattcacataacatcaaattcaatatcttaattattttcaggtttacagttcagtgtctttttgtgtattcacaatgctttacaatcattagcactaggtaatttttgaacagtgtaattacccaaaaaagaaaccccacacccatcaaaagccactttctattttccccaccggcctctggcaaccactaacccgctttctgtttccaaggatttgcctattttgggcatttgatacaaatggattcataaagtatatgatgctttttgtatagcttttttcttttcttttcttttgagatggattctcacactatcttctgggctggagtgcaatggcacgatctcggctaactgcaacctctgcttcctgggttcaagtgattctgctgcctcaacctcctgagtatctggaattacaggcacacaccacaacacctggctaattttttgtatttttagtaaagacggggtttcactatgttggccagactggtctcaaactcctgacctcatgatccacctgccttagcctcccaaagtgctgggattacaggcgtgagccaccgcacctggccttgtatagtttttttcatcaagcataatgtctttaatatccatccatgttgtgtcccatattagtacatcattcctttttctggctgaatactattgccttgtatactacatcacatttgtcaatctagtcctccatggataggcatttacactggtttcactttttggctataacaaatgtttctatggacatgcatatacaagtttttgtgtggacctattttgatttcagttgagtatatactcagaagtggaattgctaagccatgtggtaactctgtgttaacctcaggaggaactgccaaaatgttttccaaaactgctgcctaattttgccattccaccagcactgtatgaaggtttcaatttccccacatcttcacccacactgatctgtcctctgaaatatacctgtaccagcaggtgtgaggtgatatatcactgtggttttgacttgcatctttctaatgaacaaagatgttgtgcatcttttcatgtgctcattggccacttgtacagaataaaaatcttggagccactggtccagattatgagtctcaaacacatgttacgaacagatttttgatgctgcacaagaaatagcactcagcaaggcaaatttacttctatagaagggttcacctcgtaaattaagcaatggcaagggcgcacagaacaaaggaagcaggagtttttattatctctgacacagcttctacttctgtatctttcccctattggttagggttggaccgcacagtctaaaccagtcccgattggctaaatacttaaaactttttagataaggtagtcacgtaagggaagtaagagagaaagaaggcgggtcacttatggggaaactacaaaagtaacctattccctaataaggaaaggaatgtggactgggactggggttgtaggaagttcacgcatgtctaggcatagttagataagttggggcacaggtgaggtaaggaatatttggaattatagaataaagaatggggaaaatggataaggtatttgaagagtgaacctaactgtatctaacacacaaaacaccatggaatgatgataattcagtacatagtaatcttataattctgttattatctaatgaagaacagcatcccaaatcttttttgtgttgtttttgttgttcgatttgccaatcacatgcatagaaaaaaatggtatttaccagtgtatttacaatccaggacaagatgttggagggcccaatgtatttgggagcttgtagtttcaactgtgcccacctgatgtggctgataataatagttagaagatactcaagagggccgggcatggtggctcatgcccagaatcccagaactttgggaggccaaggcaggtggatcacctgaggtcaagagtttgagaccagcctggccaacatgttgaaaccccgtctgtactaaaaatacaaaaattagctgggcgtggtgtcaagcacctataatcccagctacttgagaggctgaggcaggagaatcacttgaacccaggaggtggaggtggcagtgagccaagatcatgacattgcactccagcctggtgacaagagcaaaactctgtctcaaaaaagaaaaaaaagaagatacctaagaggcaggtggtggcaatacacacacctctgcccactctgtgaacatagaaaacacatttgaatgcaatgtcactgaggaaatgctttaaattaaaaacagtcattgtctgtaaggctgctttggataatatgaccgagatgttggctatagccaggtgcttgagaatcaaatctgtggactttagtatccacctggtgtaacgaaatgcaaaaaaaaaaaaaaccaaacaaacaaataaacaaaattccccaataatcagactgttgtctgagaaaagatcattcctattaccaaatccctggaggccattcattattttccagttactaatattttcattcagagtgagaatattctgcatagacacataaggtctgttttatggtggcaactaaaatggactatttttccacatactattgttttcaacttataactttgtttttaaactccacttttctttcactaagatttttttgattctctctctctttctacacacacacacacacacacacacacacacagatataaacacatacacacacatatagatatttacacattattttcatttagcctgtgcttttaaaaataaatttcagtggttgacacctagttcacatgttgtcaggcattttctattttagtaatttaattttcacctatattatttcattgaaatacatttgaattaaatatgaaactttaatatgaaagattccattggcttttcttgcaaaaaactttaatataaaagatgccattggcttttttattattataaatatatgtagtgtgataacactgtatacatagcactataaaactactgtattagtgtgttacatataatttttataactctatgaagtgctttattattcccattttacaggtgaagagagcttagatacaaatagaataaataacatttctaaaatcacctccttgtaggaggcagtttcaggagttgaagatgtttttaacaatagttaatatatgctgtctcaacatcagatatatattttttaaaaatctacataggccaggcacagtggctcactcctgtaatcccagcaatttgggaggctgaggtgggttgatcacgaggtcaggagatcgagagtggtgaaaccccgtctctgttaaaaatacaaaaactagctgagcatggtggcacgtgcctgtaatcccagctactcaggaggctgaggcaggagaattgcttgaacccaggaggtggaagctgcagtgagccaagccactgcactccagcctgggtgacagagcgagactttgtctaaaaaaataaataaataaataacgacacatattttaaaaacatgtacctcttgttagctttttaaagaatgtttgtacatatttatttaaaaatgcatatgaaaattttacatttaaatatgattgcataatttattggcaaatatctataatgattcaaagattcaagtagaatataaatgttctgatttagcatcatcttaaaataagtggaatttgttgaatgcaaaaatggtttcctcatggaattagaagactttttaacttaaccaagaaggagcacataatggaatggcaattgagaaaagggacttgaaacatgagtagaaggtcaaatattgcatagaaaaactaaattaccataagtatatagagaaaatcagtatttgtgaatgcaaaaatatcaaataaaattatgtcagggaggtgaaagatctctgcaatgagaatcacaaaacactgctgatagggatcagagaaagcacaaagtaatggaaaaccattccatgctcatgaataaaaagaatcaatattgttaaaatggctatactgtccaaaacaatttacagattcaatgctattcctatcaaactaccaatagtattttccccagaattttttctaatatttatataaaaacaacaaagagtctaaatagccaaagtaatcttaagcaaaaagaacgaagctagaggcaccacacttcccaacttcaaactatactacaaagctgcagtaatctaaataacatggtactggtaaaaaatcagacatatagaccagtggaccaggttagagaacccagatataaagccacccacctataactatctgatctttgacaaagttgacaataacaaccaaggggaaagaacttcttattcaataaatggtgctgagataatggactagccatatgcagaagtttgaaactggacctctatctctctccatgtacaaaatccacctaacatttgctacagacttaaatataaaatctaaaactgtaaaatccctaggagaaaacctaggaaatactattctgccaataggtcttggcaaagatttcacgatgatgacacccaaagcaactgcaacaaatagagaaactgacaagtaggacctaattaaacttaagagcttctacacagtgaaagaaactatcaatagagtaaacagacaacctacataatgaaagaaaatatttgcaaactatgcatctgaaaaaggtctaatatccagaatctataaagaaacataaatggccaggtgcagtggctcacacctgtaatccccgcactttgggaggcctaagtgggtgaatcacgtggtcaggagtttcagaccagcctgaccaatatggtgaaacccccgtctttactaaaaatacaaaaaattagctgggcctggtggtgggcacctgtaattccagctactcgggaggctgaggcaggaaaatcacttgaacccaggaggtggaggttgcagtgagccaagattgaacaactgcactccagcccactccagcccgggcgacagtgagagacttcatctcaaaacaaacaaacaaacaaaccataaacaaatcaacaagcgaaatataaacaaccccattaaagaatgaacaaaggacataaacagacacttctcaaaagaagacatatgcacagccaaagagcatatttaaaaaatggtcaacgtcactaattattagagaaaggcaaataaaaaccacaatgtgacaccatctcagtccagtcagagtgtctattattaaaaagccaaaaaacaataaatattgatgaggttgcagggaaaagggagtgtaagttagttcagccactgtggaaagagcaatgtgaagatttctcaaataactttaaatcatctgacccagccatcctgttaccacatatatacccaaagggatataaatcattctactataaagacacgtgcacacatatgttcattgtagcacttttgacagtagcaatgatatgtaatcaatctaggtgcccattaacagtggactgaattagaaaaatgtggcatatgtacaccatggaatacaagtcagccataaaacagaataaaattacgtcctttgcagcaacatggatacagctggaggccattaatataagcaaattaatgcaggaacagaaaacaaaatactggatattctcacttataaatggaagctacacaacgagtacacacgaactcaaagagaaaaacaataaacagcagggtctgcttgagaatagagggtgaggggggtgaggatcaaaaatctacctttctgccaggtatggtggctcacgcctgtaatcccagcactttgggaggctgaggcgggtggatcacctgaggtcaggagctcaagaccagcctggccaccatggtgaaacctcgtctctactaaaaatacaaaaattagctgggtgtggtggcatgcacctgtaatcccagctactcatgaggctgtggctgaagaatcgcttgaacccagaaggcagatgttgcagtgagcagagattgtgccactgccctccagcatgggcaacaagagcgaaactcttgtctcaaaagaaaaaaattaaaaaaaaactacctatcaagtaccatgctcactacttgcctgatgaaataatgtgtacaccaaaccccagtgacatgcaatttacccatttcacaaacctgcacatgcgcccttgatcctaaaatagaagttggaagaaaaacccacaaataaaaaagattcagaactagagtagataaaacaacaatgattttaaaaagagcttttttgcccttctaaaatatgggtgttaatagatgttctggatcttcagcctcatcttggaccatgaagaatggaaaacaaatgtcaggggtgatggagcagagacatccctaaaggcttcctgaggctgccatgctggcccaggtatgcctaactcctgagtttttatgtgaaaaaaatataacttacgtgttttaagtcagtatagatagatctctattattcatagctgaataaagtaaaatgagctgttgaacttgaaaaaaaaatagagatattttgaaaaatttgctccagttacaatttaccaataacaattacagctctttgccgggcatggtggctccctcctgaagcaggtggatcacctgagagtttaagcccagcctgaccaacgtggcaaaacactgtctctactaaaaacacaaaaattatctgggtgtggtggtgcacgcctgtaaacccagctacttgggaggtggagtcaggagaatttcttgaacctgggaggtggagattgcagtgagccaagatcctgctactgcactccagcctgggcgtcagagtgggactccatctcaaaacaaaaacaaaaacaaacaaacaagaaaaacaatgacagccctctagtgtctccagagaaatgaaggagtttggaacagtctcctctcttctatgatttctgaagaaagaaagaggctcacatggagggctcagaaaatgctgagtctgatacatgaaggacagacagtgaagtcagtgtgtctttctggattctgtgcttccttaaaatgttctgctaaaaaggaaattttctgttaatcttcaaattcctgagccaaactagtctttaatatttaatagagaaatgtgctgggcatagtggctcacgcctgtaatcccagcactatggaggctgaggcgggcagatcacctaaggtcaggagtttgagaccaggctgaccaaaatggagaaaccgcgtctctactaaaaacacaaaattagtcgggcgtggtggcacatgcctgtaatcccagctactcgggaggctgaggcaggagaattgcttgaacccgggaggccaaggttgcagtgagccgaggtcacatcattgcactccagcctgggcaacaagagtgaaactccatctcaaaaaaaaaaaaaaaaaaaagaacaaccccactacaataaaggagaaaacaacagcgaatttcatcacctgtaacattgtaacattctagctacccagaagtcctcagtctgtccatgtgacaacttcactgctagaacaacctgcattcacaaaaaccagtgcactaaattgaattacaacaaaggaccctcacagagtccactttactcccctgctacctctaccagagcaggtggtattatccatggctgagaaacctgaagacagatcacatcacaggactctttgcagacaatccccagtaacagcccagagcccagtagctccactggatggttaaacccagaagagcaataacaagcactgcagtctgactctcaagaagccccatcccaagagaaaaggggagaccatcacatcaagggatcaccccatgaaacaaaagaatctgaacagcagcctagagcctcaggtcttacgtctgacatagactacccaaatgagaaggaaccaaaacaaaattctggtgatataaaaaagcaagaatttttttaacaccttcaaaagaccacactagctcactagcagtggatccaaaccaagaagaaatccctgaattgccagagaaagaattcataaattccattattaagctacttaaagagacgccacagaaaggtgaatattaacttaatgaaaaaattttaaaatacgggatatggatgaaaaaagtctccagagaaatagacagcataaataaaaaacaatcacaacttccggaaatgaaaggcacacttaaagaaatgcaaaatatagtggaaaattacaatagaaccaaacaagtgaaagaaagaacttcagaccccaaagagaaggcttttgaatattccaatctaacaaagacaaacaaaacagaatttaaaaatgagctaagtctccaagaagcttagaattatgttaaacaataaaatctaacaataattggtgttcccaaagaagaagagaaatctaaaagtttggaaaatttatttgagggaataattgagaaaaactttcctggccttgctagagatctagacacccaaatacaagaagtccaaagaacaccaaggaaattcatcacaagaagataatcacctaggcacacagtcatcaagttatctgaagtcaatatgaaggaaagatttttaagagttgtgagacaaaagcatctggtaaactataaagaaaaacatatcagattaacagcagatttttcagcagaaaccctaaaaactagaaagaattggggtcctaagtttagcctccttaaacagaacaagtatcagccaaaaattttgtatccagtgaaactaaacttcataaatgaaggaaagatagtctttttcagacaaacaaatgcttagagaattcaccactaccaagccactactataagaactgctataaggagttctaaatcttgaaacaaaacctcaaaatacaatgaaatagaacctccttaaggcataaatctcacaaggcctataaaacaataatacaataaagaaggtattcaggcaacgactagcacaatgaatagaatagtccttcacacctcaatactaacggtgaatgtaaatggcctaaatgatccagttaaaacatacagaatagcaaaatggataagaagacaaatatctgttgtcttcaagagactcacccaacacttaatgactcacttaaggtaaagggttggaaaaagatattccatgcaaatgtaccccaaaagaaagcagtagtagccattcttacatcagacaaaaaagactttaaagcaaaaacagtttttaaaaaaagataaagagggacaaaaaaaaaaactagtccaacaggaaaatatcacaattctaaatatatatgcacctaacactggagctcctaaatttataaaacaattatcactcgacctaagaaattagatagatggtaatacaacaacacaactataatgggtgacttcaatactctactgacaacactagacaagtcatcaagacagaaagtcaacaataacaaaaaaaaatggacttaagctataccctagaacaaatgggcttgacaaatatttacagaatattctacccaacaactgcagaatatacattttattcttcagcacatggaacattcttcaagatagacatatgataggccacaaaacaagtctcaataaatttaagacagcagccataaaaaatgatgagttcatgtcctttgtagggacatggatgaaattggaaatcatcattctcagtaaactatcgcaagaacaaaaaaccaaacaccgcatattctcactcacaggtaggaattgaacaatgagaacacatggacacaggaaagggaacatcacactctggggactgttgtgggatggggggtggggggagggatagctttaggagatatacctaatgctaaatgacgagttaatgggtgcagcatacgagcatggcacatgtatacatatgtaactaacctgcacattgtgcacatgtaccctaaaacttaaagtataataataacaaaataaaaaaaagaaaaaataaataaataaataaataaataaatttaagacaatcaaaatcatatcaactactctctaagactacagtggaataaaattgaaattcaactccaaatgaaccatcaaaaccatgcaaatacatgaaaattaaataaattttggaaattaaataaatacatggatattaaataaaacattaaacttaagttcaacccatttttgaatgattgctggatgaaatcaagacagaaatttaaaaattctttgaactaaagataataatgacacaacctatcaaaacatctgggatacagcaaaagcagtgctaaaaggaaagttcatagcatcaagtgcctacatcaaaaagtctgaaagagcataagtagacaagctaaaataacacctcaaggacctagagaaacaagaacaagccaaacccaaacctagcagaagaaaagaaagaccagaactaaataaaactaaaacaaacaaaaaaaattcaaaagatgaatgaaatgaaaagctagctcttagaaaagataaacaaaattgttaagccattaacagaattaaccaagaaaagaagagagaagatataaataagctccattagaaatgaaagagaaaatattgcaactgatgccacagaaatacaaaagatcacattcaggtctactgtgaacatctttacatgcagaaagtagaaaatctaaaggagatgaataaattcctggtaatgtacagtcctcctagataaaaaaacaacaactctgaacagactaataacaagccagattgaataataatttaacaaattgccaaccaaaaataaaagttcagaaccagatggattcacagctgaattctatcagacattcaaagaaaaattggtgggggtggggcccagatggctgactagaagcagcatcccatagaaaagaaccataatagcatgtaaatcttgcaccagcacctgaggtatccaggttctctcatcagaactgactaggtggctggcatgacccatggagaagaaggaaaagcaatgtggtgtggcaacccacctgacagccaaatggggctggagagcccccaaccccagccaagggaggcggtgagtgagcaggctacccagtctgggaaactgtgctttctccatggaactgtgaaacccatggaccagaagattcaatttgtgaacccacgccactggagcctaaggttccaactgttggaaacaagagcttggagtcacaaagaaaacaagcactcaaacaaggaatttctcagcaaggcaaatttacttctgtagagaggtgctgctcatgtctctggctgttgtgagagcacaccatacaagagagggaaggggtttgtatccctaatgcagtctctacttctgcatcctctcctcattggctggagtcagaccacacactctaactcgattggctattctaaatcaagactggcaggaaggttgtttacagagtaggtaactaggagtgaggaggaattcttccaaataaagaagagatgtgggttacagattgggactggttggaagagttgtttacagagcaggtagctaggagcaggaaggtacaaggaagttgatttccagaacaaagaacaaggaagctatcctttgaagaggaacttattatgcctgacacaaccctggagctgagtagattctcaacagcctctcagctagaatctgcttaagcctgccaagttcccaggggaggggtgaccaacaccacagctgtggctggctgctgtctaagctgtttgagctccttgggggagggacagcagccagcacggggactcacaactgcctaacaggctaagatccttgggtggggaaaggcagcagccatatctatagctcctgaccacacttttcccctgctagagccagggaggctggacagcttggtctcaagaggtgttccccacagcccaacacaccggctgtggctgactgcagccagaatgtctcttcaggcctgaccctcacccatccctcctcactgggcagggcctccctccaagaactccaacagctccagccaggggctcagggacagaactgtgatctccctgggcctgaacccctagcgggagaggtggttgcagtttctgtggaccagcagacttagcctttctttctgctagttctgtggaattcaggcagcccagatgactgggtttccacccatcaaaacacccccctccaccaaggaacagtcaaagtgcttcattaaatgggttctgctccccgtgccacccaactgggtgagacccttcaataggggttgtcggacaccctatacaggagcaatcatactggattcaggttggtgcctcttgacatcagtgatctcagaggaaggagcaggcaccattctttgctgttctccaacctccttgagtgacatctccaggtacaggagtaaaccagatgaatagagcctgaagtgaccccccagcaaactgcagcagccctacagaagagggacctgactattgaaagaaaaacaaacaaacaaacaggaagaaacaacaacagcatcaacaacaaaagcgtacccacaaaaaccccatccaaggctgggcatagtggctcacatctgtaatcccaatactttgggaggctgaggcaggcagattgcttgaggtcaggagctcgagaccaccctgccaatgtagcgaaacccagtctctcctaaaaaatacaaaacttaaacaggtgtggtggtgcatgcctgtagtcccagctattcgagagcctgagacatgagaatcatttgaacctgggaggcagaggttgcattgacccaagactgtgccactgcactccatactgggtgacagagtgagactctgtctcaaaacaaacaaacaaaaaaactcatccaagggtcagctgcctcaaaatgttgaaattagacaaactcatgaagatgagaaagaatcaccaaaaccctctgaaaggccttatctcctagagatgatcacaatgtctcttcagcaaattcacagaactggacagaggatgagatggatgaagtgacagaagtaggcttcagaagatgtgtgataacacactccgctgagctaaaggaacatgttctaacccaatgcaaagaagctaaggaacttgataaaaggtgagaggaaatgctaagtagaataaccagtttagagaggaacataaatgacctgatggagctgaaaaacacagcatgagaacttcatgaagcatacaaaagtatcaatagcctaattgacaggcagaagaaaggctatcagagtttgaagaccaccttgccaaaatgaggcaagcagacaagattaaagaaaaaagaataaaaaggaacaaataaggcctctgagaaatatggtgttctgggcaggaaatgcatgaggggagaagaaaacacacacacaataccattaagggtaaacaagctttatcccacctaaaaggcaatgcagatataataagcaaattgatatcataagcaaattgcaatgggaaagggagaagggaaaatatgtaaataaatgtacaaaaccaaactatgtggtccatagttcaccctatttaaaaatatgtagtcctcataatattccatttaacagcctgttgtaactctttggtgttaagcccaagcacatctaatatatgctggtgccaccaccagaaacgtgtcccatcacaccaccataagtggtgtctctctctgatgttggaagagacagtgccaaggacattttcgctggaggtaggaggtggggtcataaaaggaatagcaaagtaccttgttcaaaaggatcagatatagttacactcatcagactatgggggattcgtcaccacaccaggaagcaacagcctgggctccagagtcggccacccatctgtgcacaaacaaggagaggtctcttgaagccttggtgcagtcttggaccctgtctctttttgtaacaagttgtttggcatgaggcccagtgatgagggccctttgcgactgggctcagggaacacaaaaaggtcaagttgtttttgtgattgtctattgtttttcaataactaacgtataggaatagattgaaatagagattctttctgaaatagcgctggatgaacgcctcaaggggttcacacaacctgtgccaggacttggtgaccattgtttgtgtccatgttcaatttagttcaaatttaatatttaacatgtcctctacattcggcctcaattggatactcaattgtaggaaaatacccttacagatacaaggggaaggcataattgatatagattacagatacagggtaaggacaagagaattaaaagcacaattaataaaaaccacacccaccatggctttgcaaggagagtcatattgtgagaactgccagagatatacacacaacattcagtatgcagtaaggtgcaaacccctccttgggttgcggtaagcatatctaatgccatttgattttgcaacacaacagtactcagatgagcaaattcatctgataacaacataaattcagtgctactatcattaagagctttttctacatgtaaggtaaatcttttaatttgttgctgaagcaagattgtacgggcggcaggggagaatactgtgatagggtaccaccaccagggagtccagtgcattggtaaccagcgatgtttgtaagcatctagattactggggaggggaatattaacctggatggtgaatgtaattaatggccacccccaagtgcatctccccatccaatgcagggacaggtatcaccacccataggatctgcatacccagagggccccccaggggacagcaatggatctactgtaatcatagtgtactaatctcttattaaaataggaaagagattgtggttcattgggggcaatgttgttgatttggagtatgtgttgacaaatgtctgaagaaaccccaaataaacattagaggagccatttaaggtctccagacagagtgggaactgtatggaatccggccaccagcacagcaggttttcagtatattccattccaggattattgggcaggataccaaggcttttgatgcaaggggagggtggagttcatcttttgtctgacttggcaaagatagattgcttagtgtggtgaaaggaagcccaggttggattgcaagtgttgttgttgttgtggccctactggtaacaatatagccattcagaaatgttgtcagggacaattctgcaaggtagcacattccaggcggcctccggcaactcaacatatagccaacattgactgcggttggcttcagttgcagcagtggctaccaagttgatgaatttattcttggcttcagacacaaagacacaggtgctgacgagtagtagatagattatttcttgtaataacaaaaacagaggggaacaagatattgtttttcatctttaggaaattgtactatgccttcatttcctgctttcatagctacaaagtcaccagccttagggtcaggatctgatggacgctgtacccatatttcagctccaggatttaagctacctgtaccaggggatccgaatcccccagttctgtatgtagcctctgttggggcagagatttcctcaggggttgttgacaaggtaccactaacaattgagcaacccacatttgtggttttagagcaaaagaatctggagtgtataaaatgacctttaactctccctggtaatcgctatcaattatagcaccatacattataatgcctctcattgcaaggcttgaacacgttgtaatccattcatccgcattcatgtttaccgttatggtggaaattttggcctgctgttcttcctgctgattaagtagtctgtcaagagaaagcagagactcatgagcatcaatatggaaaacagggccgggtgcggtggctcacgcctgtaatcccagcattttgggaggcccaggtaggtggatcacgaggtcaggagatcgagaccatcctggccaacatggtgaaaccccgtctctactaaaagtacaaaaattagctgggcatggtggtgcgtgcctgtaattccagctacttgggtgactgaggcaggagaattgcttgaaccccggaggcagaggttgcagtgagcgagattgtgccactgcactccagaatggtgacagagctagactccatctcaaaaaaaaaaacaaaaaacaaaacaaaacaaaacaaaaaaccagtgataatggtagtgtgtgctaggattgagatatctccccagtattgttttccccaaacctctttattcccaattaaccatttgctttgttgcctggggcatccaggtagtaagaccatttggtattgaccaagagttggtatagaagtgaaaaatccctctggtctccttctgaatagctcaggggaaccgctactagttcagctaactggctgctcccaccccttccttcatcagaaatgcttttgtttttaataggattataagccacagccttccagcattgattcccaccaatgtatttggtggatgcatcagtaaaccaagcatgtttctgatcctctgggcttagttctttaaaggatttgccccattgggtgggggaggtttccttccctatctgcaggacttgctcggtggtttcctgagctgggagattttgtacatccttatgtaaaagtgatactcactttggttttgacttagcctggtcttgtatgtaccatgtccattttatgatgctactttcttggacatgtcctatctgatgggttttgggggaactcaagtcccaagtcataataggaatttcgggcctcataaagacatcatggttgaagcagaggtgttccatttccagcaaagcccaatagcaagctaacaattgcttctcgaaaggggtataagcttttctggcctctggcagtttctgggtccaaaacctgaaaggtaccctcttcccatcttgtttctaaggctccaattagcctgttgatctaggacagttacttgcagttctcctggcccatcctgtatggaccatagatccagggccagttgcaccgcttgtttatcttgttcagaagccatgctgtctgtctctccccaatgaaagtcatagtgttttctagtggctgcatgcagaggttgtaaaatattactcaagtgaggaatatgatgtctccagaatccagagatgtcaataaatgtctgggcctcctttttagtggtaggggttgcaaattctagtattttagcccctttaccttttgtaagatggactatatctctgcattccataggatgccaaggtattttacagtttgtgcaggtccttgaattttgctaagcttaatttcccatccttgagataggagctgggtttttacctgctccaagccccagcaaagtagttcttcagttttaacctgaccgagtcattctgacagctgctttttttcagcaatagggtgatagctttgagcctgatcagtcaagatataggcctggcattgggccagggccagtctggaaatcacactggcattttccttttccaacttacatttctcttatagcaaccagcccgtatcttgacacattaacttataagcagtaagcaaacaccatccactctgggagatccctcagcatctcctttgctgactggaatctcctgcagcacttcccgcacagtcaaaggtttaaattgcactaatttagattctcagttctcacaaaggccagttccccttgaccattcagttgccaagggggaaaactgggggagttcccatcctgagacatgggaagtccctgagcctccagccccatccttctggccaaaaagcggcatacttttgtttccaaatactgtttgtgacaccaaaaatgttctgtgcaggaaacccgcgaggggagaagaaaagacccacacacaatacttttaagggtaagaagttttataccacgtaaatggcaatgcagatataataaacaaataatataataagcaaatcaatataataagcagattgcagacataataagcaaattgcaatgggaagaggagaatggaaaaggtttacactcaccagactgtatatatttacaccaccagactgggaagaaacaacctgggctccagagtcggccactcatccgcgcacagatgaggagaggtctcatgaagctttggcgctatctgggaccctagctcttttgtaatgagttttttggcatgaggcttagtcatgagggccttttacgaatgggctcaaggaacgcaaaaaggtcaacttgtttttgtgcttgactattgtttttcaataatgaatgtataggaatagattgaattagagatttctctgaaacagcgcgggatgaatgcctcaaggggctcacacaacctgttccaggacttggtgaccattgtttgtgtccagattcaattaagttcaaatttaatatttaactttacctccataccagactatggaggattcaccaccagagtgggcagtaacaggctgggctccagagttggccacccatctgtgaacacatgaagaggaaaaaaaaaaaaaagtgaaaaacattatcccacagtttgcaaaatatattacatttaaacagttgtaaatacatgaacataacatctcagtcataatcaaaattaagtatctgacaacacactcgaaagtttgggagaaatagaaaagtgtttgtgtcttccccaggcccacagttccagtgccctgtgctccctcattgtcatggggttgccatgggccccacaggatatgggaggcacagagcagatggtggctgaaggtggggtgtcttgtgggaccagcttcaagatcagagaccttggttcattgtattgaaatcagccagctcaggaaaagagaccttgctgcctcaagctctatgtccatctgcattagcgatgtaaggaggcttgagcacccatgggcacacaaacccatcccactccaatatttcatcaactattgaggagtctgaatccatgttcttgaggagcatatgcttctgcagttacaaccactatggaaaacagtatggagattccttaaagaactaaaggttatctaccatttgttccagcaatctcagtaatggctatctccccagaggaaaggaagtcattatatgaaaaagacacttgcacatgcatgtttatagcagcactatttgcaattgcaaaaatatggaactagataaaatgcccatcaatattgagtggataaagaaaatgtggtacaggtataccatggaatactactcagccataaaatggaacaaaataatggcattctcagcagcctgggtggagttggagaccattattttaagtaaagtaactcagaaatgataaaccaaacatcatgtattctcatttataagtgggagctaagctatgaggatgcaaaggcataagaatgatacatgaattttcggggaggaaaaatgggagtgggtaagggataaaaggctacacactgggtagtgtttactgctcagatgatgggtgcgtcaaaatctcagaaaccaccactaaagaacttagccatgtaaccaaacaccacccgttcccctaaaacctattgaaattaaaaaaaagaaaaaccatcccaatttctcattttaaaattgggaaactgaggccccaaaagaggctggaaattagagcccctaaataatagaaagccctgtgctctccttctccacatgggctatttttgtctccatattctcagataagcacacacagacacacacacagaaacacttctcagggaaagatcatggaagcgaggatagagaagaggcagacagaaaccaggcataagacaaggaaaaaaaaaaaaacccagaatagtggcagctctgctataagccagtgcatgcactcctctagctacgtgtccaggggcacagagaatgagcaggaggatcctccaggtttccagggttctccatcagctggggtcatctccaggtcagtttcaagaggacaggactggggtcctactgtccaactctgtaggtacctgaaatggaaatgagctatgtccccatctcagcctagcatagacaatggctacagcaaagccttttcatacctcataaataagagtacttgaagtgggtgacctcaatggtttcacatacccataagtgtctgctggcctttgttcttcattggtgaaccaagactctttgctctgagactgcaaaaatgcttctactccctggaagtccttcagagtgaggcatggtcaccccagaggcatcttgggtagataaagctgagatagagcgaaatgtgccatataactggactctgagtctgaagcccagggaaaatactagttcctgttgtgttcttgagatgatcatttggaagtggtagaaaacagtttccctggatgaggggttgtccctcatgagtaaagagcacaccccaaaaggtggaggcaaagagaggacaacggaggcttccaaggttactcttatcgcacttggagcctccggatgctgctcctttgtcccctgggaccctggagagccagtgtcttgaggacccaaacataaaaatagctttgttctgtgaggctcctgcatggggctgcagtgccagtgatggcctctaggtggtgagagccttctgggtttttggtgcccactgagctttgctggagcagctggagcaaagaagtcacaccgaggtcatgcaccttgagttattattaacgatccccatattatcaagtggtcaaaagcaggaaggagaatttgagattcccccatgcattcacttagccagtctttcccttacactcaccctgtgccagctaccctggtggacccaacatgtggtacagaaaatgattgaatcatacctgcaccgtaccctgaggaccagtctgaggacaggtgaccaaaaacactaaagcaagtatacgtgaaagaaaagagcaactgctataatataaagtagaatgttgacagaagagctgggaaatcatgacatggagtgacccaaatgcctcactgagatgacatttataccatgatgacaatgacaatagggagccagcgctgcaaaagaatgtgtcagaagaagccacccttagtaaagaatctcacaggtgtgagttgggcagaagttagaaagggaccactatggccgcagagagcctgagacagagaagcagaaggatggagaatcttggggcctgggagatgaagctagttatctgcttctttcttacaacattgccctgaaacttagcacctttcaacaacaaatactatctcacaatttgtggggaccagaaactggacacagtttagtggggtgcctcttcctcaaggtctttaggaggcttaggcctcataagaagctggacttctcaacagaagctggactggggaaggatcagctttaaactcactcatgtggaaattggcaagactttgtgtggcctgagagcccacgtttcttccatctattggcctgagcactccctcagttctttttatgtgggtctgtacatagagcatctcgtagcattggaatttgccttttcagtttgaggaatacagtacagaaatagataattaaacagaaaaacacaaaaagagagactgagggagcaagtaggaagaaaatgacagcttttagaaaaatatatatataatcttgagagttatgatttctccccctatatttgcgtgaaaattctaaccctcagagtaatggtactatgaggtggggcatcattaagtcctgaaggtggggtcctcatgattgggattactggctttaaaaaagataccccagggggctctctccctccttctgccagatgataaaacccgaagtgtgcagtctgcaattcaggagagtcatcaccagagctcagccatgctgacaccctgatcccacatttccaacccctacaagtgtgagaaattaagttctgttgtttataagcttcctagtccatggttctttggtatggcagcctgaactgcgacaaaaatgataccctatcattctgtactccattggacagaagctgaatttttgtccccaaagtgttgaaacaaaacaaaacaaaacctatgactaaaataagttgggttttcctaatgacaagaaacaacttgttgaaacactgaaatttcctttgcttaagagattttttaaaaatgggctgaagttggttggaactaatatggccatctgaagcctgtgaataataagcttgctgatgtcaggacccaaattatcattgcatgtttctttttcttttctttcttttttttttttcttgagacggagtctcgctgttgcccaggctagagtgcaatggcacgatctcggctcactgcaacctctgtctcctgggctccagtgattctcctgcctcagccttctgagtagctgaagttacaggtgcacaccaccatacctggttaacttttgtattcttagtagagatggggtttcaccatgttggacaggctggtatcgaactcctggcctcaagcaacccgcctgcctcggcctcccaattgctggggttacaggcttgagccactgcacccagcctacaccataatttttatatgttttgtcttatatacacctgataaattccctaggaggtagatgctagcataatccccactgtgtatggtaggaggctggggaagcccgaaaatagacaatggcttttactgagtcacagaaatggtaagataaacaaggttctgacccagctgtctcttctattataaaaccaaggctgcatttaggtcttcccagggaattaaggggaaggtgtgatttcataattacatacaaatggaggcctgacatgggagaggaggctgagtaatcagtagcctggcggggcctctggataggtcttatagtaagaaggggcccagtggaaggaaccttgaagagtctaacatacttccttggtgatggaacccaacagaacttaggaaaccaggaccccacctcctagagacaactctgtatccagcttctttggtgagagatgctcaagagagtaacatgctcttccatggtattcttacatttctgagttttagccttacaaaggctcaaagtaaaagccttctccgataatgcagatgtccacttagccctcatttctaatgaggtgcacccacagataacagggcaacccagaacagatccaggccagtcctctcttgtcgtttcatctagacagccccacaccaccccccactgccatgtattgcaggggcatcaagaggtgagggcattcttcctggacagaaccaggttgtcaaatgttgaaactcttgtgggtctgtcattttcatacccaggtcatggctggcaaaatggggacgaagtttatctactcagatgtgaatcccaagactttaagctgtcctctggtttccttcctggctgaagatctatgcagatgttcctatgtgcctgatctgaagagcaaaacttcaatagaggagtcatctatggtaaaaacaaggcaggcaatcaatcttttttagcttggctgctgggcactgtttacagagccgcattcagattaatgaggagctgtttgatgagtctaactcctccatctctttggaaaaagagcaggtgccctacaccactaaccttggccagcactgggctgtggtgagagcaggcacctagaggtctctatagctaggaacctgagaagaccaggacaggcccaggtcccagactgaaatatggaaactctctgacctctgtcctagggccttcccaggagtgactcatagtcctgtttcaatacaatctggccttcattcgtcccagtggcaacttggttaggtggaaagtctctgttcacatacttgtagaaatattagaggaaaggctttcatcttgttttcactttacatcaagccatgagcatttttgcatgttgctacagtttgtattgttttaactccccaccccaggcatctcctgtggcatgcagcttcagtcctacagaacttctccaaaacttaaaagccaacactatgactagggaagtttttatgcaaaaatgggggaatgtgctgtaccaaaaaagggggtgagactactttacgcatgttcctgcaatgtgtcatctcaagaactgatccccatatcccatcagggaaggaggtgtgcatgcacatgtctttataatattccataagtgaggctcttccccaccgtggttcagtctttcagtgctgatgcagcctggtataacatcctatttccatgtcagtcatgctgcagggaatattgtgtgtgtgtactaataggctgtaatcgtttgctaggactgccataacacagcatcacagaatgaagggccttaaaaacagcaatttagtttcttacagttctggaaattagaaatctaacagatgttggtggaatgacttctccaagcctctctccttggcttgtagatggctgtcttctaactctgtgttaacagaatcttctcttgtgcttctgtctttactacctcttcttataagaacccattatatttaattaggtcccatgccaatgaactcacaagcttaattacctctttaatgaccctgtgtccaaatacattcacaatctgaagcaatgctctttttgcctttgtaaaggaagtttgtctgtggcaaatgaataaatggcagaattttacatcatggggtcagtacaaaaaagggaggtgtgcaggggatttaggccactttccttatgttgggaactctaatgtcaccatctgaagggccacttatgaacagaagagttattatagttattatttcttttttattttttaaggtggagtctctgttgcccaggctggagtgcagtggtgtgatcttggctcactgcaacttctgcctcccaggttcaagcgattcccctgcctcaacctcccgagtagctgggactacaggcgtgtgccaccacccctggctaattttttttttttttttttgtattttagtagagacagggtttcaccatgttgaccaggatggtcttgatctcctgacctcatgatccgcccgccttggactcccaaggcaattcttttagccgatctttgtccttcacacagacataacagaggtccctgggtgctgaaagacgggcctcaggcccacttagatattttggaaggctgtggttaggctccattcactaaatacacgtatattaagcacttaacttgcgcagtcccttttgtagctgcttggcataattcaatgaagaaagcagataatcacagggcctcaattctatctgaagagttaaacacagtaaatattaacaggatgtccactgaatattaaatggtgatgtcctcacggcaattttaatctcctggagccaccaactcactccaattggaacactaattatggagtgtgtattacacatggtagtgcttttctgtgtttgttcacttcatttatgactaaacaacaccatgtctgatgtagagacgtaagagttgataaaaaaagaaacaaacactaccatgactgatgacatctccctagtgttcacctaaagaaattaacccaataagatcaataaactcaatgttaattataaaaattaaaagaacaacaaggccaggcgcaatggctcacgcctgtaatcccagcactttgggaggctgaggcgggcggatcacgaggtcaggaaatggagaccatcctggctaacacggtgaaaccccgtctctactaaaaatacaaaagaatgagccgggcgtggtggtgggcgcctgtagtcccagctactcgggaggctgaggcaggagaatggcgtgcacccgggaggcggagcttgcagtgagccgagatcgcaccactgcactccagcgtgggcgacagagcaagactccgtctcaaaaaaaaaaaaaaaaaaaaaaaaaaaaaattaaaagagcaacaaaggaaagattggcttagagttctccaattgaaaaaaaatgtactaaataaaatgttacaacatatttactatgaaattacatgttcaaattattttgcaagcaccattaaattttgtaaaaattattccaataattcccgagcagattatataaagaatactttataaactttggaacaagaaaactggccgggcatggtggctcatgcctgtaatcctagcactttgggaggctgaggcgggtggatcacaaggtcaggagatcgagaccatccaggctaacatggtgaaaccccgtctctactaaaaatacaaaaaaattagctgggcgtggtggtgggcacctgtagtcccagctactggggaggctgaggcaggagaatggcgtgaacctgggaggtggagcttgcagtgagcagagattgcaccactgcactccagcctgggtgacagagcaagactccgtctcaaaaaaaaaaaaaagaaaattatgcattaggtctactatcaataccaggcaagtaaaacctagatttacttaaggagattctgaactaggaaccacaagattttgaaaaaatgaattcaatacaaatgggaaaaatagatttgctttgaaattgtttgaggtttccagtttggtagtaacttatcaacactttaaaaattaccagtttgttctaacatattttctttcttctcaaaataggtacacatccacattcaaatacaattacttgcttcataattcccttacactttatctttagagtaacatatttgtatattaaactttcatgtaagtgaaaacttaaagagtctatgtgtgtctggaaggccacagaggttgcatgttcaaagaaaaatgtgagataacatcttctacatactcacttaagattcagaaatatatggcttttgattatatgcctgtgtaattttcataataatcatcttaatgactctataattagaagaaaaataataaaaatgtaacctatggaaacaatattctccaacgtatttgaagtttaaagtcactaaggataagaatcactagagatgccattccactatattactgaatagtatgttgttaccgtctgttacctagagacttgagtaaggtaaaataggttaatgttggtggcaggataacacctaattcaatgcacaactgtcttaacacattaaaaataattgttttattgaaactaagttcacacagtctaagaaaagcattacaaaatccactatactatctaatgtgcaattggtaaaacaatttactaaaatttgaataatgcacaagactattactctgaacatctatctcatgcagcacttacaagttttataagtcaaccacaaaagtttctctgtgtactttcttcacacacctcatatttcagtgtcctcaatcttctgttgaaaagtatgtaaatgacatcctaatatagaacttctcaaaccccgagcagcagaaattgaccacatgctttcatacagacactaggaataaagacacagcatcaagtaatttgagagttcaattacatcaaaatttgcctttgtaaaaatctaaaattctttcaatgcaaaaagtgtactttgaatataattgtttaagtctcaaaatattaatctcctatttctgtttaggctaactaaattatgttaaccttgaattactctttataatcaatgccctgatttagaataacattgaaagtgttagcgtcttagtggtttctactgtgaatcttctgatgttcatttagacttaattttttattaattttttatatttactgcatctgttaaatgctttcatataaactagcgttctttctttttttttgagacagagtctctgtcgcccaggttggagttcagtggcgcgatctcggctcactgcaagctccgcctctcgggttcacgccattctcctgcctcagcctctcccagtagctgggactacaggcacccgacaacatgcccagctaattttttgtatttttagtagagacagggtttcatcgtggtctcgatctcctgacctcgtgatccgcctgcctcggcctcccaaagtgctgggattataagtgtgagccaccgcgcccggccttaaactagtgttttctaaggtgtactttttaaacaatttttttcatattcattacagttgtagggtttctttccaatgtaaattatctaaaatggaataaaatttgagcaactgttagagggttacctttcagtataaattctcctatgtacaacaaaatctgtaacataagtaaaagtattgcaacaatctttatatttgtaatgtttttcttcagtataaaaactcttgtgtactctaaggcttatatttttgaagtctttccatgtacaaatgtaatgtatcactatcattacaccttgtgtactctaaggcttttatttggtgacatctttccacagataaatgtaatgtgtatcattacacttacattgcttttatctagcacaaaacctctgatgagtaagttcatagtagttattaaatgctttgccacattctttaaaatcagaatttttctcagcatgaattttcttctgtgcaataagctgtcagcaatggttgaagactttccccacattcttcacatttgtagtgtttctctccagtatgaattatcttgtgatttcaatgccttgagcaagatttatggaatttgccacattctttacatttgtaggatttctctttagtaaaaattcttacgtagtaaggtttgagcagtgattaaaagcttccccacattttttatacttgcaggatttctctcctctttgaactctcttatgttcattaagatgtgagcaccgtttaaaagctttgccacattcttcacatttatagcgtttgacggcagtatgaattttcttatgtctagtaaggtgtgagcaccgattaaaggcttttccacattcttcacagttgtagggtttctctccagtatgaattctcttatgttcagtaaggattgaggaccagttaaaagctttgccacattcttcacatttgtagggtttctctccagtgtgaattctcttgtgtttagtaaggtatgagaacctcttaaagactttgtcacatttttcacatttgtagggtttctctccgctatgaattaccttatgttcagtaagaattgatgatgagttaaaagctttgccacattcttcacatttatagggtttctctcccgtatgggttctctcatgtatagtaagtagtgagcagtggttaaaggctttcccacattctttacatttgtagggtttctttccagtgtgaattgtcttatgtttggtgagatgtgagtgccggttaaacgctctgccacagtcttcacatgtatagggtttttctcctgtatgaattttcttatgtctaacaaagggtgaacaccagtgaaaggcttttccacattcttcacatttgtagggtttctcaccagtatggattctcttatgtttagtaagactcgagcaccagttaaaagctttgccacattcttcacatttgtatggtttctctccagtgtgaattctcttatgtttagtaaggtatgagaaccacttaaaggttttgccacattcctcacatatgcagagtttctcttcagtgtgaattatcttatgataagaaaggcctgagtgagatttaaagactttgccacattgcatacatttgaaaagtttctctgtagtatgtcttatgttttctctatttagatttgatgatttactaaagactttcacacatttattatatgggaaaattttgctaggtagagttgacaaacattggttaagtccattataaatttctttttgatccttacactcacccacattttccccatccttccttaagtgtaaatcctcaagtccacagcttccatatcttctcagtatcactttttggaatgaatcttgcatgcactgttctggcaaaaggtcttcagtgtaatgagaagacatagctgaaatatgaaattaacaaaatatcccacttgttattttcagactcagatacatatactttacaaatctaatacagaaaattaagaaaaggacaggatgacttactagatgcagctgggaaacactcactccaaggagagaaaacaaaatgttgagtaaaacatcatactttaaacagatcttttgagaaaaagcttaattcagaggtaatgcagaaactgtggttgaagaggaagatgggaagcttgctcaaagtcactgggcaccaggactggctcgtagatccagaccagtcttatggaagggatatgtgaagaaaccccagggcaacacagtctagccatggacctctgagattctcactttggttccttctccttgaaaggcatttcccagctaaatctagtctgagctcctgattatagactctcatatgatccctatacatctgtgaactggcagggggagccacctggagaataggcagaggcacagcttaaactcttgtggaaatctgcagttttcactgtgctgtgcagctgtagctgaccataggtgcccatcctccgaggctctgcatcttgcactgaggggatccatctgctgctgtctgccaggctgagagagagcaaggttgtagctatcatgggactgaggtgaatctgatccatgcaccactttgcctgctggcaccgtccaagatgacctacctggctggtcctgcagaagggtgcccacagcatggcatccacttatatcacagatggtgcttgaccccaaagggccagaggacaaatccatgggcccagtgccaactgcccaggtcttcagcacactgcctgataatatcaagctgatatatgtggtctgagcttaagtggggtagaagcccacactgtcagcacacagagaagtcatgggatcatgagccagcatgggagctgagttccccttcattcacatgaataaactgggaagggtgtggccagatgaccagtcatggtttccatcccaggaagcctagcagcatagaacatctggaagaactcagcaatttcaatgcagatggcttgggacaagcctagccaattcagcctgctcccagggaagacactggagacagacctgctgagttgggggaccacaagctgggtgggccccacaactacctgctggactaaaaatcctgggctgcaggtgcaatactggttgcaaacccatggtgcaattgccctgcctggtgttccatcctcgagccatggcatcaccaaacgactcacagacacattccataacccatccttacttttgcaagcaaaggagaacagcaggacccctgataaatatgggtctcctggtgacctaaaagtgtgaactgtccctaaggaagggtaagcacagaccaccaaagccctccttggagcaaaggaattgggtgcagtgccagcagttgaagggaatatcaccaaggccccaaaataaatttggaaagaaaataatctctcacacactatcttccctccccagagcactcttaagtgccatctacttggactgaagcctgaattacaccaccaaacaagaatacattgcttcaacatgaagcactctatgaaatccactgcaggaacttatctacaaccaagggacctagacagaacctctgccctctgaaaacaaccttaaatgacaccaactgattatacacaacatacaccacagccaaaccctcaaggaaaaaaagaaataaaaaaattttaacaccccatccaaatgacagaaaattcaaaaggaaaagaagcaccagctccctcagatgtgaaagcgaaagaaagctggcaatacagaaagccagagtgtttcgttacctcaaaaggatctcactagttcctttgaaagaaccaaacacaactttaaaagttgaaaattttactacaggactttcaaaatacaattgaaagccttaaaaacagaatagactaagcagatgaaagtatttcagagctcagagactgctcctttatatcaacccagtcagaagatagtaaagaaaaaagaattcactacaaaaaaacaaagcttctgagaaatatggaattatgtaaaggggtcaaacttatgactcattagtattcctgagagagaaggaaaaaaagtaaccaacttggaaaacatacgtaaggatataatctacgaaaaattttcccatcttgctagagaggttgacacagagatacaagaaattcaaggaactcctttgagatactatacaagacaaccatcctcaaggcacatagtattcagactttccaaggtcaacatgaaatacaaaaataaaaggcaactagagaaaagggccatattacctaaaaaatgaattctatcaaacagtggacctccccacagaaaccttacaatctggaagatattaggggcctgtttttaacatttttaaagaaagaggccaggtgcagtggctcacgtctgtaatccgagctttttgggaggccaaggtgggcagatcacctgagttcaggagttcaagaccaccctgggcatcatggtgaaagcctgcctctattaaatacaaaacattagcctggcatggtagcgtgcacctgtagtcctagctactcaggaggctgaggcacgagaattgcttgagccctggaggcagaggttgcagtgagctgagattgcaccactgcactccaggctgggccacagagcgagactccatctcaacaacaacaaaaaaagagattaaaaaaaaaaaagaaattccaatcaggaattttatgttccagcaaactaagtttcataagcaaaggaggaataaaatatttctcagacaagcaaccactaggtgaattaactaccactagactggcatcacaaggtgcttaagagtgttccaaatatggaaatggaagaatgatacctactaccacaaaaacacacataagtacatagcccacagaccctacaaagcaactgtacaatcaagactacagagtgcatgaagggaacaaaaactaagatatcaatattaaccttgaacacagcagtctaaatgctccacttaaaagacacaaagtggtggccaggcacagtggctcatgcttgtaatcccagcgctttgggaggctgaggcaggtggatcacctgaggtcaggagtttgagaccagcccagccaacatggtgaaaccccgtctctactaaaatacaaaaattagccaggagtggtggcacattcctgtagtcccaggtactcgggaggctgaggcaggagaatcacttgaacctgggagtcagaggtttcagtaagctgatatcgcgcctgcactccagcccgggtgacagatcgagactctgtctcaaaaaatatattaaaaaatttaaaaaactggccagtgcggtggctcacccctgtaatcctagcactttgggagactgaggcgggcagatcaccaggtcaagagatcaagaccatcctggtcaacatggtgaaaccctgtctctaataaaaatacaaaaattagctggacgtggtggtgtgcacgtgtagtcccagctactagggaggctgaggcaggagaattgcttgaatccaggaggcagaggttgcagtaagccgagatcgtgccacttcactccagcctgccaacagagcgagactgtctcaaaaaagaaaaaaaaatttttttaattaaaaaaaaagacacaaagtggcaaatcagatttaaaaaaaaccaagacttaaccttctgctgacttcgagaaactcacctcacgtataatgacacccataaactcaaagtaaagggaaaaagtaacatctatcacacaaatgggaaaaaaacaaacaaaaaaatgcagtggtcactattcttgtattaataaaacagattttaaaccaacaacagtaaaaaagacaaacacattacataataataaaggattcaataaataaatagataaatcaacgatatttaactatcctaaatatgtatgcactcaacattggcacacccatgtttataaagcaattattactggacctaaaaaaaagacttagccagccacacaataatagcggaagacaacaccttacagatagcattacagatcatcaaggcagaaaactaacaaagaaattctggacttaaactcagcacttgaccatagacatctacagaataattcatctaatgaagacacacatacattctcatctgcgcacagaatatactttaagattgaccacatgctcagtcaaaacagatttcaaaaattcagaaaaattgaaatcatcttcttgaaacagagtgaaataaactcaaaactcaatagcaagaggaaccctcaaaactacacaaatatagaaaattaaacttgttcctgaatgacttttgggtaaacaatgaaattaaggcagaaatcagaaacttatttgaaacaaataaaaatggtgacgaggccaggcgtggtggctcatgtctgcaatcccagcactttgggaggccgaggcaggcggatcacgagatcagaggttcaagaccagcctggccaacatagtgaaaccccatgtctactaaaaatataagaaattagccgggcgtggtggcaggcgcctgtaatcctagctacctgggagagtgaggcaggagaatcacttgaacccaggaggcagaggttgcagtgagcggagattgcgccactgcactccagcctgggtgacagagtgagactccatctcaaaataaaaaaaaaacagtgacaaaatgtaacaaaaccttggaatgtggcaaaagcagtgttaggagggtttatagtgctaaacttttatatcaagaagatagatctcaagttaacaacctgataccatgcataaagaaatgagaaaaacgagaacaaagtaaatccaaagctagaagaagaaaagaaataattcaaatcagagcagaacaaaataatattgaaaccaagaaaaccattcaattaatcaaaaaaataaatttttctgaaagataaacaagatcactagatcactagctaagttaacaaagaaaaaaaaggatccaataagcacaatcaaaaatgacaaactatcaatagactaaacagacaacctattgggagaaagtatttgtagactatgcatctgacaaggaactaatgttcacaatctataataaatttaaatcaagccaggtgtggtggctcacgcctgtaatcccagcactttgggaggccgaggcgggtggatcacgaggtcaggagatcaagaccatcctggctaacacggtgaaaccccgtttctactaaaaaatacaaaaaattagtggggcatggtggcgggcgcctgtagtctcagctgctcgggaggctgaggcaggagaatggcacgaacccgggaggcggagcttgcagtgaaccgagatcgcgccactgcactccagcctgggcgacagagcaagactccgtctcaaaaaaaaaaaaaaaaaaagaaatttaaatcaacaagaaaaacagaaataattcattaaaaagtggtcaaaggacatggtcatttctcaaaagacataaaagcagccaagaaacatgaaaaaatgagataaaaagggagaaaaagaaggacaaacagcaacaaaaatcaaaacaataaaatggcaatagtaaccccttctctatcagaaaattaaaattcatggttcatggaataaacttcccaatcgaaagacataaactggtgtaaaaacaagattcaactacattctttttacaagatactcactttcaatctgaagaagacaatagactaaaagaagaatggtacaagtcattctattagaatgttaaccaaatgagaagaaactaggtcaaaattacataaggcaaactacattttaggtcaaaccctgttataaaatatactgtagtcaaaattctcacaagagacaaagaaggacattatataataataaaaagattaatttatatatgttatagaaaactataacatatatattatcatcagggttcccaaatatataaagtaaacattaacaaaattgaagaaatacacagcaatataataatagtaagatatttcaatatcccactttcagtaataagttataaagcaaggtggaatattaaatataagaacagaggacttcaaagcactctaaaaattacacctaatggacatatagcagaatacacagtcttctccatagctcataacacattctcttggatataccacttgttagggcacaaagccattcttagcaaacttttttttttttaattttgagactgagtttcgctcttgttgcccaggctggagcgcagtggcgcgatctgggctcaccacaacctccatctcttgggttcaagcgattctcctgcctcagcttccctagtagctgggattacaggcatgtgccaccacatccagctaattttgtattgttagtagagatggggtctctccatgttggtcaggctggtctcaaactcccgacttcaggtgatccgcctgcatcggcctcccaaagtgctgggattgcaggtgtgagccaccatgcctggcctagcaaacttttaaaaatggaaatcttatagactattattatgaccaaaatggaatgaaactaaaaattagtaatagaaaaaaatccacaaatatatggaaattaaacacattcttaagcatgctcgtgttcaaggatttgaagaattaatactgtacaacatctttacagtgcccaaagtaatgttcagattcaatgcaatccccttcaaattcccaatttcattttttgcaggaataaaaaagcaatgcccaaatcaaataaaatctcaagagaccatgaagagctaaataatctttaaaataaagaaaggtgttggaagcatcacacttcctgatttcaaaacacatgacaaaactacagtaataaatgcagtttagtactagcataaaggcagacaattagaccaatgaaaaagaatgtagcacagatattatctttcatgtatatggtcaaatagttacttgcacacccatattaattgtagcattattcacaaaaatcaataggtgaaagaaacccaaacttctctcaccaaatgaatagaaaaatacaatttataatatacaaataatggaataatactcagcttttaaaaagcagaaaattgggtcggacgtgtaggttcatgcctgtaatcccaggactttgggaggcccaggtgggcggatcatgaagttaggagatccagaccatcctggccaacatggtgaaacctcgtctctactagaatacaaaaaaaaaaaaaaaattagccaggcgtggtggcacgtgcctgtagtcccagctactcaggaggctgaggcaggggaatcgcttgaacctgggaggcggaggttgaagtgagccgagattgcgccactgcattccagcctggcaacagagcgagactccatctcaaaaaaaaaaaaaaaagcaggaaatcttctaacatgtacgataaagagaaatctgatggcatgatgctaagtaaaataagccagccataaaaagacaggattgtataaatccatttaaatgagacatctaaagtagttacactcagaaacaaaatagagaggtgtttgtaaagggtcagtcaagggggaaaatgagtagtttcgtgtatgttgagtttgagtttcccaagataaaaacatgtggagatacactgcacgacaatgtcaatatacccaatacaacagaactgtgtaactgaaaatatttaagattctaaattttatgttatgtattttgcacaattaaaaataaacaattacacctaaaataaagttataaagcttttcaaaaattaccttcaaatcacaagtgtttctctcacaaaaagaaaatatacatccaccaatgaatagatgttgaatttacaacaattctcatgactcctcatctaaacaggataaaaccatcactgatgaccaacaaaaatgtaaatataagagtcacaaacaaaatggggtaaaacctattcagtcaaacacagagataattaaattggtaataaacatatggctgattcatatctgacttttgcctcacactgtcttaaaatgtacagagctgaatactgtcatacaaaattataatatatgaataaaaactaaaaaatataatgaatgtcaaatggcctattataaaaactgtaacaaataaatataaaattgcaaagcaaaattaaaagaaactataacccataaaattctgaataaacatagtggagtactgatgaagaattcttctagatagctacaattttcaaccatgactggctatccataaaaagcatacatttttgaatcaagagcatacagttagagcattaatatttcacagaaaccccattataattattcataaaaagctttgagaaaataatttttaagaaataagcacttacataatactagggaaacttattaatatgttgctcttctttttacacaaaatggtaaggctgtaatctagcctgcagaagcaaagaaaagacttacatcttttactgtaagaacaatataaatattgtaaaatacggtataaaacactgattatgaattaggaataaattatgctatcattcagataaacgttgaggaatatagatgaaaatgcaaagaaagctttttacgtgcaggcaacttaattatacaaactaagccgggcatggtggctcaagcctgtaaccctagcactttgggaagctgaggcgggtggatcgcttgagctcaggagttcaacaccagcctggacaacatggtgaaactccatctttagaaagaatacaaaaattagccaggcgtggtagcactcgcctgtactgtcagctacttggggggctgagtcagtctatagagccagtctataaatatttattttataaatttccaaatgtcatccagagatcacagggcatagagagaagacaggaaatatattcctttaaaggaataaaatgattcttcggaaatcaatttttgagaaatgaagatccttgtattatctgacagggaattcaaaataatcattttaaacatgttcaatgagcaaaaatagaatgtagacaactaaacagaatcaagaaaatagtgcatgaggaaatgatatatcaacagagatttaaaaaactattaaaagtattttttaaaaaaacaaaaattgtggaactgaatacaataactaagttaaaaaaattattacagagccacaacagataacttaatgaggtaatagatggtatcagcaaattaaagacatttcacttataaatattgagtcataaaagcaaaataatactgccaacaaagaaaattttacctggaaaaatttacctctagaataaggataaaaaataaagactttataaggtaaacaaaagctgtcagtctttgtcaccatgtgtatagttctataagaaatggtaaagtaaatatatacacagatctacaattctctactataataataatgcataaaactgaaaatcttgccatagaatttaataaaccaaaacacaaatttgcataaatctgttaatagatacgcaatacgaaatgatataatgtgacactaataacaaaggatgtaaaaaggtatagttttatattcaactgaagtaaagatgagatttaagcatattgttatgtttcataaactctcatttttcaaggtgatcacaaaaatacctatagaagatatgcaaaagaaaatgaaaaaggaatcaaagtatgccactacaaaattaacaaaacaaaaacaaaggcagtaagagaggaaatgagggaaaacgtatttatgacaagcacagaacgtaatcgaaaacaaaacgcaactagtaattttatttctttctggtattattttaaatatgaacagattgaaccctttaaaaaagtaaaatagctgaatgagttaaaaacaaaatcttacaatatgcgtctttaggggactcattttagttttaaggagacaaacaggctgaaagtgacaggatacaaaaatatattccatgcaaacagtaagctcaagtgggtggggtggccatagttagacaaaatccactttaagtaaaaaattgttacaaaagataaagattggtattatataatggcaaaatggatccatttaccgggaatctataacacatataactgttatataactataacacatagcactctcaaatatataaaacaaatattgacagaaggtaagcaagaaatacacagcagcacaataattatagatttcacggcctcattctcaatcatgaatataaaaaaaccagatagatcaataagaaaataaaaaacttaaaacattacagaccaattagacctaagagacacatacagaacgttccagttaaaagcagcagaatacatgatattctcaattacacacagagcattctgttaggacacataacaagtcttaataaatttaaggagactgaaatcatacagtgtatattttctgaccaaaatggaatgaaactagaaatcagaagcagaagtaaaaccgtaaatccaaaaaatgtggaaattaaacccactcaaacatattcttgctcaaggatcagataatttcattttgttaagatgtcaacatgcacagccacgtacaaattcaatgtaatatctatcaaaatctccatggtagtttttattttttttttttgcagaaatatagttaagattctcaaattctttttttttttttttttttttttttttttttttgagacggagtctcgctctgtcgcccaggctggagtgcagtggcgggatctcggctcactgcaagctccgcctcccgggttcacgccattctcccgcctcagcctcccaagtagctgggactacaggcgcccgccactacgcccggctaattttttgtatttttagtagagacggggtttcaccgtttttagccgggatggtctcgatctcctgacctcgtgatccgcccgcctcggcctcccaaagtgctgggattacaggcgtgagccaccgcgcccagcctctcaaattcttttaggagctataactagcaaaacaccctttaaaaagaacaacaaagaggtattacacttcctggttttataacacattacccaaagctataaagatagaaataatgtggtattagcacaaagaaaaataaatggatgataaaacaaaatagctcagaattaagcacgtgtgtacataatcaaataaccttacataagattgctatggccacacaatggggaagaaaacagttttttcaacaaatgatgttgaaaactgagtatctacatgaaaaaaataaagttgagcccttccgttacatgcaccatataaaaacagtatttaaaatggattaaatacttgaacataaaaatataacaaacttcctagataagtatatgggggaaaatatgacattggacttggcactaatttcttgttacaaaagaccaagaatttgatgtcattttcttagctctgaaatcaaatgcataaggaacaaataatagagaaatgggactacatcaaacttcagaatttctgcacatcaaaggaaaaatttagtggggtgaaaatgtcacctaagaaatgggtgaaatatttgaaaatcacatatttgataggagttaattttcacaatatataaacaatgtctaaaactcaacaaaaagtgagttacttgattaagaaacagacaaataattgaactgacatctctccgaagaagttacataaatagcctataagcatttgaaaggatgctcaagattgctaacttttagaccaacacaaagtaaaatcacagtaaaatattacctcaaacccattaggagagccattaacaactgtaaccacccccccaaaaaaaagtgttacggatatggaaaattgagaggccttttgagccactggtaggcaaaaatgatgcaactactgtaaaaaacatactatgaaggtttttcaaaatattaaaaatggaattactatataatccagcaaacatggaaaatcctatttgatactgttcttggcagttattttttgaggtatgacaccaaaagcacagcaacaaaagcaaatataaataagtgggactgcatcaaactgaaaattttctgcacagcaaagaaaataatagaaggaaacttacaggatagaaaaaaatatttgcaagccatacgcctgataagaagttaatatccagaatatataaggaactcatacaaatcaaaggcaaaaacaataataagaatgataataagaacaaaactgaaaaacagactgaatggatagatatttttccagtgaagacaaagagccaacaggtatgagaaaaggacctcaacatcaccagtcatcaggcaggtgcaaaccaaaacaatgataaaatatcacttcacatttgttaggatgtctattatcaagagacacttatattttttgggtgatgtataccctaaaagcactgacttcaccaccatgcaatctatctgtgtaacaaggttgcacttgtaccccacaaattcatacaaacaaaaagaatagggctgggtatggtggctcatgcccgtaatcccagcattttgggaatctgaggtaagaggactgcttgagcccaggagttcaaggccagccctagcaacacagtgagaccccttctcttaaaaaaaaaaaaaaaagaaagaaattttaagcataaaaacatttttaaaaagagataacaagtgttgacaagtttctgaagaaaaaaatcttgtacactgttggtgtgttgtaaactggtagagtcattatgaaaaccagtatggacgttctttaaaaaataaaattaggccaagcacagtggctcacacccgtaataccagcactgtgggaggctgaggcaggcggatcacgaggtcaggagttcgagaccagcctggccaacatggtgaaaccctgtctctactaaaaaatacaaaaattagctgggcgtggtgacaggcacctgtaatccaagctactcaggaagctgaggcagcagaatcgtttgaacccgggaggcggaggttgcaatgaactgagattgtgccattgcactccagcctgggtgacagggtgagactccatctcaaaaataaataaattaattaaattaaattaaattttaaaaaaattccacataatccagcaatcccacttctgtgtatgtaaccaaaggaaataaaatcagtatttctaatatttgcatctccatgttcatttcacaattgccaagacatgaaaacaacctgaatgtttgtggaccctgactggataaagaaaatatgacacatatacacaatagagtattattcagccataaaaaaatcatgaaatcctgccaacatttcaacaacatggatggacctggaagacattatgctaagtgaaataagccagacacagaaagaaaaataatgcatgatcctcagctctatgggtaatctaaaaaggatgaactcatagaaacagagagtacaaagctggttgacccagtctcgaagtggggaaaatgggaagatgttcaatgagtatatacttccagtcctgaaatgaattaagttttggggatctaatgcatagcatcatggctatagttaatcataatgctctatatcaggggtatccaatcttttggcttccctgggccacagtggaagaattgtcttgggccacgcataaaatacactaacactaatggtaactgattagcttttaaaaaaatctcatgtttaaagaaagtttacaaatttgtgtttggccacattcaaagccatcctggactgcatgcagccagcaggacatgagttggacaaacgtgctccatatgcttaaattttagtaagacagcagacctttcactgcaaaagaaaactctgcatggtggcttaattccagcacttttggaggccaaggagggtggatcacatgaggccaggggtttgagaccagcctgtaatcccagctacttgggaggctgaggcacaagaatcacttgaacctgggaggcggaggttgcagtgagccaagattgcgccactgcactccagcctgtgtgacagagtgagactcgtctcaaaaagaaagaaaacaaaaaacaacaacaacaaaaaactctgtgaggttaacagatgcattcattaacttaactgtattaatcacttcacaatgtttacatatacaaaatcattacactttacataataaatagttatatacttttaatttgtgaaaagtaaccacacggtccccacacgtatatgtgtgggtttatttgtgtgtatatgtatacacacctcaactaatatagttgaagaatctgggaaaataaagtttaaattaccaattttagttcacactaaaaatataaaatgtagaaataaaataacattagattttcttatatttagggagatgcttagcattataacaaaattactgagtaggaatttttgtagaatcacatttgaaaattccataaggggctgggcacggtggctcacacctgtaatcccagcactttgggagaccgaggcgggtggatcacctgaggtcaggagttccaaatcaacctggccaacatggtgaaaccccatctctactaaaatacaaaaagtagctgggcatggtggtgtacgcctgtaataccagctacttgggtggcttaggtgggagaattgcttgaacccagaaggcagaggttgcagtgagccaagatggcgccctgcactccagcctgggtgacagagtgaaactccgtcgcaaaaaaaaaaaaaaattattaaaaaaaaaagaaagaaagaaacttcataagaaatcataaagcagaaaatacaccacatctgtttgtggtgttactgggattttggaaccaaataccgttatcacgaatactctcacacatttcagacataatacaaacaaaaacaaaacccaaaaccaaaacaaaacaaaacaaaaaccttaaaaaatagtttaaaggccgggcatggtggctcatgcctgtaatcccagcactttgggaggctgaggtgggtggatcacctgaggtcgtgggttcaagaccagcctcaacaacttggagaaaccccatctctactaaaaatacaaaattagctgggcgtggtggcatacgtaatcccagctactcgggaggctgaggcaggagaatcgcttgaacccaggaggcagaggttatggtgagccaagattgagccattgcactccagcctgggcaacacgagcgaaactctctctctcaaaaaaaagaaaaaaatagtttaacatagagttcctcaaaaatacacatatatttctgtgtgccccaagacaatgaaagggcagtcagataataaagtctcttataagccatgaagaggactttggctctcactataacctcaaagtaaggttactttttagagaatttaggagcattagacagaagatgcctctgtacaagagcaagaataaacaatcacgttcctcaaaaatcatctccattggagcagagcttctcaaataactcttgaagtctgtcttccttcttggcctttggagctttcacctgtggcatgtgtttcattcatccaacctacctgggggtttggctatggtctcatgtctcttcacattccagggctcctgtctttgctccagacggctaatcagttctggcttagaaacagtaagacctgttttattagaaaaaagtaatgtgattcttgctgggattctccaattaccaacctagtgttgtgctctgtagataagagagaatattatagatgattctagaaaattaataataaggacaggcgcgttggctcatacctgtaatcccaacattttgggaggctaaagcaggcacatcatgaggtcaggagatcgagaccatcctggccaacatggtgaaaccccatctctactagaaatacaaaaatgagcaaggtgtggtggcacgtgcctgtaatcccagctgcttgggaggctgagggaggagaatcacttgaacccggaggcaaagattacagtgagccaagattgcgccactgcacactccagcctggcaacagagcgagactccatctcaaaaaaaaagaaagaaaagaaaattagtaacaaaataatatttctaaacagaaagtttagaatattttatatttgtgggtctttagcttccctacccaatactacttaatcgaaaattggtggtagaagttggattttaaggtctggtcaataatattttataaaggaatttttataatggaattccaagaattaccactaaaggctgggtagggtagttcacactagtaatcccaacacttcgggaggccaaggagggtggatcacgtgaggtcaggagttcgagaccagcctggccaacatagtgaaacctcctctttactaaaaatacaaaaattagctggccgtggtggtgggcacctgtagtcccagctactcaggaggctaagacaggagaatcacttgaacccaggaggtggaggttgcagtgagctggattgtaccactgcactcaagcctgggcaacagagctagactctgtctcaaaaaataaaataaaataaaataaaaaaatagaattaccactaaactagagtgaaaaatgcccatcacctcaaggtagaagaaagttaatgtaaacataaaacatcttgaaaattttcttctctatcccaacaaatccccaagttttccttgaaagcagagatctaaaactcatttatacaaagcagaaatccccaccaaacattctacagaggaagaaaataaaatcttttgtgtgaaatagaaattgtgtattgaagttattctcacccagagagaccaggtttctgtagttctctagcatcactttcctatacaaactctgctgagcagggttcagaaactcccactcctccagagagaattctatggtcacatccctgaatgtcaacagttcctgaaaaacaaaacaaaacatagtgaccaactgtcaatgggcagagttcttgactccatgtgaaaagagagaattgctgtgacttatgagagttactggaattattcaatctgctatttttaacaaatatattctctgatgtattctctaacactgaggaaagaaaacagaatccatgtggccaggttcggtggctcacgcctgtaatcccatcattttgggaggccgaggcaggcagatcacctgaagtcaggaatttgagaccagcctggccaacatggtgaaaccctgtctctactagaaatacaaaaattagctgggtgtggtggtgcacgcctgtaatcccagttacttgggaggctgagggaggagaatcacttgaactcaggaggcagaggttgcagtgagctgagatcatgccatggcactccttgcctgggcgacaaacaaaaaggaaaacagaatccacaaaaccaatgtagatacttttctaaataatcactataaaattaagggcatcaacacaggcatatacagtttgagttttatgtctacagattatagaataagttgtaaatattattcatacagagaagtcatgatgggttagaaggtatctgtcaaattttaatgtacgtgacaatgaactacagatcttgttaaaatgcagtctgatccaggtgatctcaggtgaagcctgagtttctgaatttctaaaagctagccagttgataccaaggcatccgaatcaagaatattttgtcaaacacaaagtggttgagccccagtttatctgactagtaaacaaagatgagccttcattttccaaagcaagctttaagcaaagagaatctaaaaagaaagggaagtttgcagattaaatgtgatggtttatgtacatcagtcagtaaatctcccaaggtacttacgaataataaagataaaaataattaactttataattaaaaaaaatctgtcacagagagccttaaccaagtgattgaaattaacatgaattgggccaggcgcggtggctcacgcctgtaatcccagcactttgggaggccaaggtgggcagatcacgaggtcaggagatcgaggccatcctggctaacatggtgaaactccatctttactaaaaatacaaaaaattagctgggcatggtggcacgtgcctgtaatcccagctactcgggaggcagaggtagcagaattgcttgaatgtgggaggcggagattgcagtgagccaagattgtgacattgcactcaaacctgtgcaacagtgcgagactccatctcaaaaaaaaagaaaaaaaaaaaaagaaattaacatgaactacaatagaacaaattgatgtacagtgtcaacacacatgggcagacaatcatcagagctatgatattattggcaacaaaaagtaaattataacctgaatctaagcataaagaaacatctttatgcaaagttcaagctacagatatctcccaggttttataacctctaataatgtatttaagtagcctttcctcagcatttgaaagagcaagtcttatctaactattctcttttccagaatattctgagttattctgggcaattagtgacatcctctttaaatgtgcatttttaaaatcctgtttctggccaggtgctgtggctcacgcctgtaatcccagcactttgggaggctgaggcgggtggatcacaaggtcaggagatcgagaccatcctggctaacatggtgaaatcccatctctactgaaaaatacaaaaaattagccaggtgtggtggtgggcgcctgtagtcccagctactcgggaggctgaggcaggagaatggcgtgaacccaggaggtggagcttgcagtgagccgagatcgcgccactgcactccagcctgggcgacagagcgaggctccgtctcaaaaaaaaaacatcctgtttctgcatagagctgatggaacatccagatggaacctaaacaatacacattcccctcttcactaatatctgaggaccctataccatccctaatagagatcttaggtatctacacctttccacattgatgtgacacaaagagaactttatttatttatttatttttgagacagtctcactctatcgcccaggctggagtgcagtgagtggcatgatcccggctcactgcaacctcgcctcctgggttcaggtgattctgcctcagccttccaagtagctggaccacaggcacgtgccaccacacctggctaattttttgggtttttagtagatacagggttttgccaggtggctctggctggtctcaaactcctggcctcaagcgatcctcctgcctcagcctcccaaagtcctgggattacaggcatgagccactgtgcccagtcacaaagagaacatttttattcttacaggtcatacactcgatggtgagaactggtcatggtatgtaagaagcctggatacaaagaataaaggagaaggctctgatatataaaagagaagtatttttcagcgcctcttaactactatagtaagaagtaatatttataagaagaaaaggaggaaaaaaagtatctaaaacaaactggttaggtaggaacatcagaagtagagaagtaaaagtttgtaagttctaaagccaagacattcaagaacgaaaagagaacatcacccctgagctgggacacattcacctgagaaccagccatttcttcctcttgctcttccctttgggattccttctcaggtgatattatctggaaaatcacatctgtaacttgagcatacgccttttaaagcatcagcaaaaccccttcacctgctaccaccgcacccacaggcagatgtaccttaaaggcacagaaaaggccacacttgcttgtcctttgtcattgtcacaggagaatttcaggaacagtgagcttctacctaaagactaaaatgtgagtctccagtttcctgcctttagatgcccttccatgccagagatggcagcaatttctgctgcagcaaagggcccatagggccccactcccctgctcccatgaaaaccaagcacagcaggccccatgacctctctttaaaacaaagcctgggggctaggcgctatggctcatgcctgtaatcccaacactctgggaggccaaggcaggcagatcatctgagatcgggagtttgtgaccaggctgaccaacatggagaaaccttgtctctactaaaaatacaaaattagccgagtgtggtggcgcatgcctgtaatcccagctacttgggaggctgaggcaggagaatcacttgaacccaggaggcagaggttgtggtgagccgagatcgcaccattgcactccagcctgggcaacaagagcgaaactccatctaaaaaaacaaaaaagaaaaacaaaaacaaaaaaaaaaaacaaagcctggggaggctgagtcaggagaatcacttgagcccaggagacagaggttgcagtgagccaagatcgcgccactgcactccagcctggggcctgggtgacggagtgagactgtctcacacacacaaaaaggctgaactcaattctcacttatgtctgggagccctcatgattgcctctggctttatcttacaattacatgggacacttaattaaaacaatatggatgcttccacccaggccaacataatccgtcgagaggacacaggtaagggtatttcttcaaactggccatttaatcctaactagaatgtgatgagctgacaatcacttagctaagaattgcctcttaaactttaatattcggagaaatcatctggtatttcaagccccagactaatttgattctgcaggtttgtttgtttgagacagagtcttactctgtcgcccaggctggagtgcactggcgtgatctcggctcactgcaatctttgcctcccaggctcaagtgattctcctgcctcagcctcccaagtagctgagactacagtcacatgccaccatgcccgggtggctaatttttgtgtttttagtagagatggcctttcacgatattggctaggctggtcttgaactcctgacctcaggtgatccgcccttctcagcctcccaaagtgctgggattacaggtgtgagtcaccgtgcccagtcaattctgcaggcttgaaaggagtccacggattggcttcattcacagctaatgctgaccctgcttgccctagatcacttataacagcactcaactagacaaagcgccacagcacacagtcccttatacctacactcttcttagaacacaaatgcttttggtccaaaataaaaaccaccaatcactattctaaaacatggcgttctctgttggtcctttaaagtttccagaggcagctcatgtctgagtaagtctgcatttggaaaacaacacgcgcacatgcattaatgcgatgtttatggagcatgcgctgtgtgctcagaagcacactatagagcattgtgctgggaagatgacataatgtgaatttatcctcataacaccctgggaggtgggtactaactgtcccataattccctggatttatatgaaaagcccagcatttaaatttcttcttgttctatcactgattttttttttttttttggagatagagtcttgctgtgttgcccaggctggagggcagtggcacgatcttggctcactgcaatttccacctccccagttcaagcaattctcctgcctcagcctcctgagtcactgggattataggtgcctgccaccacggccagctaatttttctatttttggtagagatggggtttcgccatgttggccaggctggtctcgaactcctgacctcagttgatctgcctgcgccccggcctcccaaagtgctgggattacagacgtgagtcaccgcacccagcctttcttttgttttcttttttttttaaatgcatggaataggccaggcacggtggctcatgcctgtaattccagcactttgggaagccaaggcaggtggatcacctgaggtcaggagtttgagaccagcctggccaacatcgtgaaaccccatctctactaaaaatacaaaaattagctgggtgtggtggcacacacttgtagccccagctacttgggaggctgaggtgggagaactgcttgaacttgggaggcagaggttgcagcgagcagaaatcataccactgcactccagcctgggtgacagagtgagaccctgtctcaaaaaaaaaaaaaaaattaaaaaaaataaaaaagcttgaaataaaagctgaagatagacacaagaatgaaatacagaacgggaaaattaagtgtagttcaaagggatttctcagcattgggtttatatttactttcttgtgattcctggagcaactgctggatatgcaggaatagaaaatggtttgctaggtggtatgcctctagaaacagtggttttaattaaaaaaaaaaattaaagaccaaaaatatttagttatttgcttccatttatctgcttttgggtttggaagaattgtgaacaaccactctggagaggcagcaggagccaaactctgatctcctttaatcaactctgtatggagattccaaggtggagccggacctggatgaggcctcagaagaggtgaaacgtgggtaaggctgggacagggagagggccctaggtagaattctgatctccatgtcactggggtatttccaattctgtgttttctaagcctgcccaagagaaacttgactccccaggtttgtgtgattttaatctatttcacccaattccctgtctattttataacatacagtaacaaggaatttaaccaaaatgcatagtgttttctaggacatgtatattagaagctaaatatttagtcttcacaaggtaaaagcaatagaaataataactatagggctgggcgcggtggctcatgcctgtaatcccagtactttggaagaccgaggtgggtggatcacctaaggtcaggagttcgagaccagcctggccaatatggtgaaatcccatatctactaaaaacacagaaattagccgggcgtggtggtgcacgcctgtaatcccagctactcaggaggctgagacaggagaaaatcactagaacccggtaggcgaaggttgcagtgagccaagattgcaccactgcattgcaacctgggcaacagagcgagactccacctcaaaaaatagaaaagaaaaaataactataataacaactcttctgttcatgagtggcccttcagatggtgacatcagagttcccaacataaggaaagtggccctaaatcccctgcacacgtcccttttttgtactgactccatggtgtgaaattcagccatttattcatttgccacagacacagttcctggattgcagagattatgattgcctcatctgtttttctaatcgccatatgaaatgaaagtaattggttgatcagtctccagctctccttttttttcacccaagtgaaaactggaacaactcccatctaggaaccaaccaaagagattatttttgtgagaaagagaagaaacactgaatgacttattcccctccctcttagatggtagcagaattagaccctcttgtcagcctcaccccagtctgcacacaacaacctcaaatgtctcaaagactctcaggtgctgggaagagggtctacagtcactctgggttgatgtcctcatggcaatccaaacaggaaacactgagactgattctgtgggaacagaatagacaatagaacttccctggtagagcttcagatcctaaacccatatgtgatatcacctgtccttaatcagttagcttgggtaagaggaatgacaggaatattttattccagtatcacagcttacaggtaggtgtggttgttatggtcatggctgtagatattttgtggcctggaccccccactgctggggtgattctgccatcagattctatttacaccaagagcctctcacacaactgcagcaggtcagaggacaagatctggaaattttcaaggaccacactttgaagggtggggctctaaaatgtcgatgttgacctgtcacgatgcagaaaatgtttcctatgggctttctgtacattctcaatccaaagtcaggtcctgtctcatgagtcccagaagccagtgcttatatgcagattctagtgacatcaacctggctgtgcattattgggtgttatagcatgctgcgcaaaaccagaggagagatccagtcatggagactgctctaacacattataaatgatatgtcggccgggcacggtggctcacccctgtaatcccagcactgtgggaggccgaggtgggcggatcacgaggtcaggagatcaagaccatcctggctaatacagtgaaaccccatctctactaaaaatacaaaaaattagccaggcgaggtggcgggtgcctgtagtcccagctactcgggaggctgaggcaagagaatggctaaaaaaaggggaatagaaaagtgggccgataaaaagttctttgtcaaggattctcattagtttacaggaataacattgattagtgattggccatacagggttaagctagaaggtgtgggctatagtgtcctgtgtggcattattagattaatttatagctatgtgtggcagtaacaagcagtttcaagaggtgaatacattgctcaaaggagaagtaggacataattctggattcattttaatgtctctctgagcctgataactaacagaacttgcatccctcagataaaagttcttttactttctcaaatcccagggcctggattcaaatttgggggtttcagatttaggttgcagaggtatgggaaagtagcaggtgccctttgcacattctcaggcatttgtacaggaggaggaaaagaacattttaaattcttaggtctaatcaatgcatatgtgtaaccctgacagggtttgtctctgaattcatttcagatttgaagatgccagggacattgaaagaggtggaatggttggttgctgccctgtaaggttatttttgtagaaatctgatctgactgctctacaagggactatagatcacaaataggcagagagaccattttgcctgcaatttggggtttgcacaattgtgggttgtgacttgaagcccaagagggaaagaccctctagggtgaagtctgatgggtaccttacatgtttatatcatacctggtcatttcagacagtgttttcaaaaatgtaattaaaagcacaatcatctccaaccccagaaaaactctccacaatggcagaacacaaagcaaaaaccatatgattacacaattaagccagaatgtgacattaattgcaggcaatttgctaagagattgcaaagatagaaagaaggttgtcataattagtcctcaagaagaccacgtgacagcactcacttgtcgtagatagtttatcctaaacccacctgggaattggggaggtcagttgattatattctatgaaagataaacttcccacatcttcatgacaggaggtagttttgcaacttggagccaaattcaggtacttgctgaaggtagggttttacttctctgtagaaactgtggtgccaggtgcggtggctcactactgtaatcccagcactttgggaggccgaggtgggcagatcacctgagatcaggagttcgagacaagcctggccaacgtggtgaaaccccgcctttactaaaaatacaaaaaattagccaggcgttgtggtgggcacctgtaatctcagctacttgggaggctgaggcagaggcaggagaatcacttgaacctgggaggtggaggttgcggtgagccgagatcacaccactgcactccagcctgggtgacagagggagactccgtctcaaaaaaacaaaaaagaaactgtggaagagggatctatgttcttggctatttatatattaaatcaatggttcctgactcagagtactgggccatggtgcttctgcccatgaagcttagcctacagcctgcagcccacacagaccctcactgctgcatctgcgctccagcaccatgccacagagcagagccctgggctgcaggaggagggcctggagcactcctggttagaattgtattttcacaataatggaaatgaaagtggtgttccagcctaagtttctggggttctcttctttttgagatggagtctcgctctgtcacccaggctaaagtgcagtgacgtgatctcggctcactgcaacctccgcctcccaggttcaagtgattctcctccctcagcctctcgagtagctgggactacaggcgtccatcaccacgcctggctaattttatgtatttttagtagagacagggttttgccatgttggtcagactagtctcaaactcctgacctcaagtgatcctcctgccttggcctcccaaagtgctgggattacaggcatgagccaccacgcccggcctccagcctcagtttctactgacaacgatgacatggaaaaagtactactggatgcccagcaagaagtctggatggagttgctccacgagttgtcaccgtgacagcccacctcactcacagacacaaggaaccaacagagcttctgaaacacccaaggcattggagagaaaaacagttattagtctgtggaagattatattgacagaaagaaagaaattgaaagcatattgaaggaatactcagattagatatgggattggttaagtgagcaagaaaaaattccccccaatgtttctctttaaagaaccaaagtgcacagctactctcagcatgagaaacacacgcattctgaagaacagatacatattctatccagaatttctagaggtttttcttccatctttgctgctgtctcatctgctggccattggactagggatttatattggaagccatctaacaacatccaccagcatcttttgatgaggaataggaaaccaacgttgttcacatattggaattatatctgagcttgcggcatagctaactgaagagctattatatccgtgggtgggtgactgcatccgttgcatttattagttctgtaaatgccgcatgcctaagttagtaaaatgaaaaaatagggccaggcgcggtgactcacgcctgtaatcccaacactttaagagaccgaggcggacggatcacctgaggttgggagttcgagaccagcctgaccaacatggtgaaaccacctctctactaaaaaaattagccgggcttggtggcgcatgcctgtaatcctagctactcaggaagctgaggcaggagaatcacttgaacctgggaggcagaggttgcggtgagccaagattgcgccattgcactccagtctggggcaacaagagcaaaactccatctcaaaaaaaaaaaaaagaaaaaagaaagaaaagaaaaaataaggtcaggcccggtggctcatgcctgtaatccaagcactttgggaggctgaggcgggcagatagcctcaggtccaaagttcgagaccagcctggccagcatggcgaaaccccgtctctactaaaatccaaaaaccagccgggcatgttggtgcgtgcctgtaatcccagctactcaggaggctgaggtatgagaatatcgcttgaacctgggaggcacaggttgcaatgagtggagatcatgccactgcactccaccctaagcaacaggctgaaattctgtctcaaatacatatatacatatagacactaaaatcatgctgacctataatcatacctgttggattaattaataagcatattaattgatgtgacagaggtggggttaatatctattgtaacaatttgttactatattttttcctttttttgagacggagttttgctcttgttgccacggctggagtgcagtggcatgatcttggcttactgcaacctctgtcttcctgtttcaagcaattctcctgcctcaggctcccgagtagctgagattacaggcgcccaccaccacgccaagcaaatttttgtatttttagtagacacatggtttcaccatggtggccaggctggtctcgaactcctgacctcgtgatccacccacctcagcctcctaaattcctgggattacaggtgtgagccaccgcacctggcctattttcttttgatataagatataaatatcttaggataaacaattttaacatattagtcataacgtatgtagtattagaaaattatctgtaatattaattcagttaaaataatttatatttcaaaagaatacagaatatcaaaatcattattttaaagcagtttgtccaaaataaatattgtgctgttatattcactattgtacaaaatactgtttgtttgtttttttttgagatggagtctcactctcttgcccaggctggagtgcagtagtgtgatcctggctcactgcaacctctgcctcccaggttcaggcaattctcctgcctcagcctaccaagtagcagggattacaggcgttcaccaccacacccaactaatttttgtatttttagtagaaacgaagtctcactatgttggccaggctggtcttgaactcctgacctcaggtgatcctcccacctcagcctcccaaagtgctgggattacaggtgtgaaccactgcacccagccgaaaaaatactctttaatttaaatggatgcagtttgtctacacaagagtacatataactatgccaactgttcttaaaatataaatagaaaccaaggtacagagcgtactctgagctggtcttgctatcgcagcataagcccttcagcctgcacatattagtaattaccttggagcagcagttttctattgaaaacacctatcgtttttatctctccagatactgaagagatacccttctgtatctgtgaccctttagctttctggattgctgaattaaatcctatccttcgtgttttctgagacaaagttttgctcctattgcccaggctggagtgaagtgggcagatcacctgaggtcaggagttcaggaccagcctggccaacatggtggaaccctgtctctactaaaaatacaaaaaattagccaggtgtggtgacgggcacctgtaaacccagctactcgggaggctgaggcaggagaattgcttgaacccaggaggcagaggttacagtgagccgagattgtgccactgcactccagcctggacaacaagagtgaaactccatctcaaaaaaaaaaaaaaaaaaaaaaagatttacatatattttgaagaagcagagaaaaaaggtacatataaaagttttctaggccgggcatggtggctcatgcctgtaatcccagcattttggaaggccaaggcaggaggatctcttaaggccaggtgttcgacaccagttccgggaacatggtgagatgctgtctctataaaaaaaaaagaaaaaaaaaaaaaaaaaaaaattagctaggcaagttggtgcatgcctatagtcctaggtaactgggaggctgaggtagcaagactgcttaagcccaagagttcaaggttatagtgagctatgatcatgccattgtactctagcctaagtgaaagagtgagactctgtctcaaaaaaatcaatcaatcaataataaaagttttctaaattctatccttcaggaaaaggcaaaagaacaaaatgtcttccctcattttcaagtgggggaatgaagccccttatttctaatttgtatttgcttctgcaaaaggtaggtctaggcccatggtcttgaactactggacatctgacaactgaggggtggcgttgggcacactgtgtgcacataaaaaaagggtttgtgggggaactaaaaggcaaacgagggaaagttgctatctagaagccatgggtgggacagtgcagggttacggaaggactggttcatgctatagattgtgtcccaggagaggctatgctctgacttcttcctgtgtccatgcaggcagatgagactataatcaggtggcacagaagcctgggttggtgaaaaaaccaggttgccagtacagactacctttcaagctctactgataatttacacttaattaaaaactgaagttaaaataagcaaagaaatctttccaaggtgacaaactcaggaagcggcaatactgattggaacacagacatatctgactcagatgtcaagtcaagccattctatcatttgggacattttcccgccccatcctgctcactgaagtggacaataaccattctaccaagagccactgtgctgtgccccactgtgtcccttagatgcattttgctttgcaggtttttgcactgcctcactgggttgggtgttccttgtccttggggatattttttttctctcttcaccaatctgagaaaattttctcctcaatactagcatccaaattgcctggccagcactgtatctctaagaaatggaaactgggagttggggaagaaaatcttaatgtcctaatggatttgctttcagaggaaaggtatacctgatttctcccaggcacaatgcaccaaccactccacagagaggccacattcccatacctggcagggttgcccctgagaggagatggcccaggggctgatattcactagacacctcaggagacacagccactgtgggcatctcatgtcatccccagacagttctgaaactcaaaaccaggaaaataacacagggtggctgaggatgcattgccctgtgaagtttccaaagtggaacctcaacccaaaaacattctgataaggtgtctgtgcctaggaaagattaaagggagattggcacaaaggtttttgttttttggtctttttttttttcatggtggagtgttgggattattctctgctttcatctcctgtaaaatgtttgcaaatgaaaaacaattctttttctaaaaagtgccatccgctgctctttgaaataatgatcaatcaaaatactgtgtctgaaatgtacaaaaaaggactaatagttgataatgttgtgaattagagaggggaagttggtgttgaagaatgtcaggaaagaactgaaaatttaaaattcaactgcaagtcagagttaggctggggcaacagagtggtagctttgagattctgtttgtcacacatttggaaaatccaagagaaaaccacttctgtggagtgttaaataaatagcaggcagttagactgaggtggctctagtaccctgagttcctacattaaaaaaaaaaaaaatcaaaggcaaatacatttcttgtaaattgctaccttagggggaaacaaaattcagatttttcagatttaagcaaccacaaaccttcaattaacttctgattacataaccaggcaatgacaacctgaatagtctaaataagatgactacataactggaacgagtcagttactgaattcggtttgcttcatcctgcactttataaaaaactttccttcaagctcttcggctggacccccaaccacaaaccgtggctgggtgctctctgagcataaatcactgttaacttcaataagttttcaacattttaaaggtgactcccatagtttttaaacaggagaaggaaaagactgaggacccccgggatcacagcacttcccacgcacaaaccacacacggggtctggactctgccctgaggacgcttccattgtccccgcagtcggggcagacgcaagaacgcgcgcggctcttcccagggtgggctccgggcgggaagcgggagaacggaacgggatgcccgcccagggtcccggctgctggcccacctcgcatcctgtgcccggaggtgatcgacggccgagctgtgcctgccggggactccagtccgcagactccggagctgacagctgggaggccccagtcccgtcactgccggttccggccggtttcaaccagccctgcccccacctcgggatgcgcggcctggcacactcaccatttttcggcttccgggatgtcgtggagtcttagctctggatctcacagcatctgcaagtcagagggcaacagaggctgcgacagtcaccgggaactactagagcagaggatactaagcaatgaagatggaccctgagctctggctggagcgagacaaaggccccgccagctccaggacaccgccccctctaccttggctgcgcacctgattggacagttcccactctagcgcccatgattggatacagttccatgccccgccccctcaggtcatgagtgacaggaggcgtgatctgagaatgtgttgaataaggcaagagttacaggtttttcctgaacccttttctggcgcgcttccttcctgaattggaaactggcccttcctggggaacatttgcatttaactttgtatataaagttatctttatttgtgaatagtatacatatgttattcacaaatggaaacaatataatgacaattattttaaaatctcagatttcatcattttcctagcctccagtcttttgagcaggcagcctaagatgtcgcaagggaggcaattctctaagaaataaactgtgaagcacatatgaattttacattttctagtagccacattttaaaaaagaaaccaggcgtggtagcctgtgcctgtagttctagcaactagggaggctgaggcgggagcatcacttgaggccaggagttttaagaccagcccgggcaacatagcgatgatcccatctctacaaaaaataattaaaaatttagccaagtctggtggtgcacgcctgcagtcctagctactcagaaggctgaggcgggaggatcacttgaccctgggagaccaagactgcagtgagccacgatcacaccattgcactacagccggggtgacagagtgaaaccaagtttaaaaaaaaaaagatctctgaagaaggcattttctctttctgcaatttagccaagcagctgagtatgtcttgaagtcatcttctaatttttaacagggcaaggatgttttctaaaaccccagtctccagagttgccatggggcaaatcccggcagcatacatgaaaatcactcacagctaatgcattcttcatcagatccagtgcttcttacccctggcaaataaaaatcacctgcggggttgggagcggtggttcacgcctataatctcagcattttgggaggccgagacgggcgtatcacctgaggtcaggagttcgagaccagcctggccaacatggtgaaacccccatctctactaaaaatacaaaaattagccgggcatggtggcacacgcctgtaatcccagctactcgggaggctgaggcaggagaatggcttgaacgtgggaggcggaggttgcagtgagtcgagatcgcgccattgcagagtgagacttcgtggggagggtggtggtggcggcggggggtgtggagaatgactggaggggcggggcaggatgtaaacttaaaatccctgaagcccaagttgcaacagaccaattaaattagaatccttggagttggatctgggcaacaatatggtttaaagctctcagggtgattacagtgtgtagccaagtacccaaactactgcttttcaccaacagctttttcttttttttttttgagatagagttttgctctttttgcccatcctggagttcaatggtgcggtctcggctcactgcaacctccgcctcccgggttcaagcgattctcctgcctcagcctcccaagtaggtgggattacaggcgcttgccaccacgcccgctaactttttgtatttttagtacagacagggtttcaccatgttggccaggatggtcacgatctctcgacctcgtgatccacccgcctcggcctcccaaagtgctggaattacaggtgtgacctaccgcacctggccttcatcaacagttttgatgaattagttataaatggtttttcaaatgcatgtaaaaacgtttgctgctgagttgtgaccttacaatcttaactcatttcccacttactatactttgcagaaccaacctctgctactcgctttgttcctgattgaacctggttccatgtgtgctcagtgtatactatgcacagggcactgtgctgtgtgccctggtcccggtgagcatcattctcaggggagaaccttgctgaaaacaaaatcacatcccaaaaagttaaaatcatgctactggccgggcgcggtggctcacgcctgtaatcgcagcactttgggaggccgaggcgggtggagcacgaggtcagacgttcgagaccagcctggctaacgtggtgaaaccccgtctctactaaatatgcaaaaaatgcaaaaaattagccgggcgggggggcgggcgcctgtaatccgaactacttgggaggctgaggcaggagaatccttgaaacctgggaggcagaggttgcagtgagccgagattgcaccactgcagtccagccccggcgacagtgcaagactccgtctcaaaaaaacaaaacaaaacaaaaacaaaaaaccatgctacttaccgaattgaggtgaaaattaaaagacctagggggtcacccaaaggttagaacatgaatcaataacttggaatattaatatacatctgatggtgccctgagcacacatgtccattttattttattttatcttaccttattttatttttattttttgagacagagtcttgctctgttgccaaggctggagtacagtgccgcggatctcggctcactgcaacctctgcctcccaggttcgagcgattctcctgcctcagtctccccagcagctgggattacaggcatgcaccaccacgcccagctaattttttgtatttttagtagagacgaggtttcactacgttgggcagacctcgggtgatccgcccgcctcggcctcccaaagtgctgggattgcaggcgtgagccactgcaccccgccacgtgtctgcctttaaaagaaaacaaaataaagcattactattattctcaaatattaatttataactattatgcaaacatgtaatatttaaattttgattgatgtatagcatgcatacataaatatatgcgcaaaacatttatggaaaacttgatgaattattacagaccaaactcgtgtaaccaagaaatagaatcagacttgctcatgcccgacagtcactttctccttctcttcacaaaagtaagagcttaagagctaagtgtagatcaactttgtcattttgtacaagtgttttattacagagcattaaaaacatatccaaaatacaaagaaggtgtataatagacctgtcacccagctttaacagcaacttgacatgtgccatttttgtttcattgatatttcaacccatttcccatccctttattaattttttagtttttttttagataaaatgtatatacattgaaaggtacgatcttaactgtaccttttggacaaatcaactcactcatataaacatctcctcttttaagaacagaattactccacttaatcattaatgtacccataagttacctcaaagtattatttaaaatctagatttttataaaataggtctgagtttggactgagaattcatatttctaacaaagtacggatccatagagcacatggtaactacagagtctcttttatctaaagtaaatacaattggatgaataaaattaagaaaaattgacctaaggtgaaaggacaaatcaaaacatctgtgcaatatgctatctgtaggagcatttggttaagaaaaatataaactcaccaaaaagttttattattttaataatgcaaattggcaaaattcctactattgttttcatagaaatgctccctcacaataaaacattttcatataggaacggttacagtggctcacgcatgtaatcccagcaatttgggaggctgaggcgggtggatcacgaagtcaggagttcaagaccagcctggccaagatggttaaaccccgtctctactaaaaatacaaaaattagccaggcacagtggcaggtgcctgtaatcccagctactcaggaggctgaagcaggagaatctcttgaatctgggaggtggagtttgcagtgagctgagatcataccactgcactccagcctgggtgacagagtgagactccatcgcaggaaaaaaaaaaaagaaagaaaaaaagaagaaaattcatatcataggaaggcactggttaaaaatagcaaatatttgaaagtaaatgtcttataacattaagtagcagataccttttgaagcccatagatggcctttacatagttacccaaaattcagttgtttacacagcaagtgcagataatttttatagcttcctattaaattgttattaaaattaaatttattaattttaattaaattaaaattatatattaaaattatatgttaatgcccttacaaagttttcttctaaaattcactaacttaaattttgtatatgacatataagttccctttacattcaacttaaatttccttaattttattaggcagtgcctgtgtgtttaccacccagtattatttggggttcctccaacagacatcacggttggggaaacaggctgttcctgcttctttttcctcttcagggcatcagttcatcagtcaaccaagtcgtgtgggagtggaggtcatatattccctagcatagagggtgtcatttctgagcactctgctcagagtagaaaaagaccagaaggtccttttagggaacacttacttggggagggctaagccccttaaggtgtgagagctctaatcagcaggtatagacttttcaggagggagggatgaggcagccattctgaacctggagctccatcacctcttgtcccatctccagacaattctagagggctgttcaggaacatgtctgaaaggtgcacatggaggaacagtgtgggctttgatctggcttagatgacgtctgtcctggggaggcaggaggtccatgctcagtatctgggctggtatctttgaggtcagtaggttgcctttttgtatccaagtccattttcactagggaagaggccagacagtctaaatggcttccagagcccctctctgattctctttgggagatagggtctgaaagaggctaagtcagtattttggggaaattctacaaagtctggttggaaactgggaagacctcttgcctggtgcttaaatgctccatttgcagtcctagccatataggtgtttggtagacatagagctgggtttgcatttatatcagcacaaccttatgtcagagctgaagaagtggccaggataagtgtcttggttgcaggctggagaacatcataaaagcaaactgctagtttgctgattttcatcttggcaatgagcattgagtcctggccaaactgcttgagtgcagcatgaggccaattcataaatccacctccacgcatcagctgtccataagataagaggaagctcagttcatgttttgacgagaggctctgccatgtgaaagaatcacatctcaggtgtcttgacagctggctgacttgtgagaaaagatccaggacagatctatttttggatgcatcgacaggcttcagccttccagaataatgtgggagaaatggcttgcaaataaaatatggtaggaactcctgataatgaagagtaaaaacatgaacttaataaaaataagacagaacctataaaaacatgccatagtaaaagaaatacaaatggacttttctagcataaagaggcattcaaccataacggtgatcaggagaaaataaattacaaaataaatgtgttttgttggtgtgtgatcagggatactaatctgcgtctttgtttgggtttcattttgagattgaggatgggaaatggcttgtagccctcagggggctttgagaaatgtggcaatcatccccaagagctatgttcttcatgttcattcttgacactggctgaagagcctcagctgagagaatgacccacaaatacaggttagggatagactatggggctctgtgcttagagagaggagagtcacctaaactcctctttaccacagcccaatccaaatgagggtaattccaaagaaactaaactcaaagccagaaacagcactgctaggttaggcaagaatttgactcttccaaggtgaggagaaacagaggatggattaacacagtcttccctgggaaggaaactgggagttattttagcaactagggccttatagatcctggactctgtgtaaaaagtaaagtagaggttcctcttcaaagactttcctccccatctaattatgaataaatagtaacttctcttagaagcaaaatttattcaaagacctgtgctcctaaatatttgccctggcatgcttatactggtccaagcaagcattaggtcatagcctgttcctcttccttatttaaaagtgtttttacctttctcagcattccacaagttacttcctacttcctttgttctcctctacctttgtctcttttaaaaagttctaagttgctagccaatcgggacaaatgcagaatgtgaggtcccattccagcagtagggtggatacgtcaggttataaataaccctgtctcttttgttcgatgtactcttgtggcaaaactgctggcgagtataccctttctgcaggaagtaaaaatgcccttactaaataaattaaatttatgttcaagggctatttctttacggcactgaaaaacaaacatttcaaatactctggaaacagaaaatgtagctcctgcagaaaaaataaagatctgctacttctcagacacttttacactcattgtagtagtaaatgacagaacctgtggtggtcctaggaaaaaaacttgaacaatgtactcagaatggcgaactctgggttttcttgagggccaagactactgacatttcatgtgttatatttcatgtaagacatttgatgtcttttggataccttatgacagttatgcatttctttataatcagaaaaaaaattagcatgtaatcatgcatatatgtttgtatattgtacaatgtatcaaaatgaatatgtatatttatattctcccccttaaattcagaaaaagctgaagctctttactctctcagcctgagtccagggaggacggatatccacaaattagtggatacaaactaattagcattctctaatagagaagcgtttctattttttgcagtttgataaactcatggtgaaattaccatgctactttttttactttttattatttaatataaaatctaagacaagatacattaagtacttagtgacacacgtatttattcctcacctgattcataatatctgcctaattttaaactttcttccattttataggttcaattgatcttattttattgtaggatattaaatctaataccagcattgttattttatatattatgttctttaattttgtatattttctattggcattttacactgaaataatgcagtgtttcatcatataaatgactttatctgtatttaaaaaataaaagtctggggccgggcgcggtggctcacgcctgtaatcccagcactttgggaggccgaggcgggcggatcacaaggtcaggagatcaagaccaacctggctaacacggtgaaaccccatctctactaaaaatacaaaaaaattagcggggcttggtgtccggcgcctgtattcccagctactggggaggctgaggcaggagaatggcgtgaacccgggaggcggagcttgcagtgggccgagatcgcgccactgcactccagcctgagcaacagagcgagactccgtctcaaaaaaataaaataaaataaaacaaataataaaataaaataaaaagtatttgggtattttttttttggtcttataatttccatattacatagtgatgagataaacattaatgttttgagagtattttaaacttttgataatgactcatttgatccacatggaattttttactgcatgtgtgggttgaaaatctggttttgttttttgtttccttctttgttcatttgttgagacagagtctcattctgtcgcccatgttggagtgcagtggtgcgatctcagctcactacaacctccccatcctgggctcaagtgattctcctgcctcagcctcccaagtagctggattagaggcacgcaccaccacgcctggctaatttttgtatttttactagagatggggtttcaccatgttggcaaggctggtcttgaactcctgatctcaagtgatccacctgcctcagcctcccaaagtactgggattaaaggcatgagccatggcacctggcctgaagagctgatttcgcttctgcttcatcttcaacctgatctccccagaactgatagctcttgctgtaactgggggatagcagtttattattccaataaatgtggcaaattcaataacatactacaaatcagttggaaagcaggacatgccttcaagacatacacaacatgcaccaacctatgtacaacaataataatttgtaaatttcagttggaatggaaaataaaatgacaaaaagattgttaaggtaaattaaaatggaggtcaggcctgaagaattcctgagcagaccaaatcagttaggcctcataagtaacctcaaccttgcttgatttccaaacataagcaaaacttaacttgaattctttcttgtagctgcctattttaaagaaaaacagaaatgaatctcaaccaatcagaagtagccaacaaccttatatagctaggaacttttcaacaaggcaaagaaaccaaaaaccgagaagaaacaagtttctaactaccactaattgagtaatttattttgtttctacattttcccaataaatagttgcctcttacactgtcaatgaaacactaaacctcttttagactggtgtcctataattaatcaattgctcctactcaaactctttacaattttattgcgtctcagattactttttagcagaataaaataaactatctaggaatccatattacaaaaacgtttacagaatatcagaaaagacagaatgttcatacaatatatgaatgtagacataagcaaatagaaaacttacatgttcttaggcagaaaaactcaatatactatcaatatcaattgtctttaaggtaatttagaaatttaattttgttctaatatagatatcattagatattgaggtaggcattttactataaaatagcatataggctgggtgcagtggctcacacctgtaatccagcactttggaaggctgaggcgggtggatcacctgaggtcaggagctcaaaatcagcctggccaaaatagtgaaaccccatctctacaaaaatacataaattagccaggcatgatggtggatacctgtaatcccagccacttgggaggctgaggcgggaaaattgcttgaacctctgaggcagaggttgcactgagccgagattgcaccactgcactccagcctgggcaacaaagcaagactctgtctcaaaaataaataaataaataaataaataaataaaacagcatacagatgaaaagccaagaaaagccaagaaaactgtggaaaaaaaaacacacacaacaaaacacagataatattggccagccgtgggaaaaatcttgattgattaaaaaagctaataatagatcattggaactaaaaattcagaaatagactaaagtgcctaagaaactgtcttagtccatccaggctgctgtaacaaaataacttaggctgggtaatgtaaaaacaacagaaatttatggctcacagttctggaggctggaaagtgctagatcaaggcaccaagaaatttggtgtttggtgacggcccagttcctcacagatgataccttcttggtgtgtcctcacatggcaaaagagacaaggacactcccttcaacctcacttattccattcaggaagatgaagctctcttggtttagtcacttcccgaaaggtcgcatgcctaatactatccacatatgaatttggagggggacacaaatacttaaaccacagcaaaaatttaataagcaggaaaaactagtggaggatggcatcactaatacttgacgtgtgaaaaaccgatgttcctatcacaaaggaaagaaatgactcattcttcatgacatagaacaaaataaaggtccaatgaaagataaatctatacagaaaaataaattggtgttgataaggtgaattctacaggttgtatcaggattttggaggtttctggggatgggcagggccccagagtttcctcctgtgacattttccctgaagttgctcacgctcttactcaatttgaaagtggataaaaatgttttttcctgttctaatatttaagaaattcaaaacaaaaaggcctatgtatgcacgattatcaaacaatccgtcagtggtgctctgctaaggaagggcaaagaatcccacatccacaaaagtacgatgttctgtcagataaagatgtctccctgtgccagagccacatattttacacatgatcagaggctttcccagggaagcattgctctgcagcccttccacagacttaaccctgagaatttgacttagaagatcactgatgaacacacgcccaagcgttctgatctacatgaatcctctcttaatggttccttccagggatctgggatctttcccaaagtcatctgtcacacacagattgactcaaaaatgtggacaaaagctttgatcctcactggcacacctgctctgtcttatcagcttctctagaagtatgctgctctaattgctcctgagagaccccatcttaaggtatctctctgtgccaacataattgatttcataaagtgggaagagaataggcaagagtcaagctatgctgggggctgtctaagattcccttacctatgtctctaatttacgcacatattgactaatacagattcatctctaagtggtaggaaatgggaaggaggagccccagttctcagaaagagaagccccagttcacagaaggagaaaatgtaatcaatgctgcctagcttccagcttcagcttacctatgggggactgagtctcttctgaaaaaagcagctgttctccatagtattagcctgttctcatgctactaataaaaagacatacccaagactgggtaatttataaaggaaggaagtttaattgactcacagttctacatggctggaggtgggcggtcggttcaaaatcatggaggaaggcaaggagaggcaaagtcacatcttacactgtggcaggcaagagagcatgtgcaggccaactgccctctataaaaccatcagatctcgtgacatatattcactaccacaagaacagcttgggaaagacacacacccgtgattcgattacctccctccaggtccctctcatatcacacgggaattatgggagctagaattcaagatgagatttgggtggggacacagccaaaccatatcatccatcatttgaaggaactgtggtctcaggaagctaggcattgagtgtgcacgctgccccctagaattccacacctacatcacagagacagaatagtctcaaaggattcttaagggtaatatgggcagccaaaaggaggagatgaattcacagcctctgccttaccttctggtctaacaaatactactcctatcctggcccaaaaggattcccatactcttttctgggttgcacaaggagtaattcagaaagacaaaaacttattaatgccccttcattctccataacttctgaggtaagttgttcattccctgggttttaggttgttgttctctctctacctccacagaaccagtgtgtcccattccattacctataatttcacccatattcttcttacctcctactttctcctagacattttatccagtagagccaggtgaaatacagacaagtatatttacacaaaacttaaccagaactaagttggagtcccataagccctattgggctgcgatggcactcaggctggcctaaggttgtggttatggaaaagaatgccacattttgcccaggaatgatcaatgtggaatctcaaatttgggaaatagatccttagagcccccaaccgtttcatccttctcttggaggcaatcaggaagagataatccccttttggaggaaaccatgtctaatcaacaaattacctaaccaacatgtgtggaaaaggaggtaaaatcagacagttgacccattttagtagatttggtaataaatgccacaaagtcagagttcaagtggtctcaaaagcctaaaaggcgacacagattagtttcaaggaacacatggtgtcactgagtgttccaacttcccagagggtgagtaccatggcaactttgagcaggctgggaaacgatcccagacccttgagggtctgtgagaaatcaaactttcggcactttggaagtcaggaaaccagcacgttgggggaggcgggatcacagttacttgctgagacaagctgccctggctacgttcactcccgtcaggtaggagaggttaaagaacaggaaggctccccctccgcagggcggaactgctctgaaggcatggaggagcgacgctgaaggtggaggcttcgcccaccatgccgggagctaaaatttcttaaccaatgccggccagcgatggcagggctgcgggactacaatcccagcgcgcacagggatcagggactgtgcgcatcactggaagaagcggcagaacggcgcgcgcctcgctgagctttctgggagatgtagtctcatggcaactcccagccttttggccacaaggctacgggacctacaatcccagcctgtaccaggatcgggagcagttcgcagcactagaggaaggggcagggcggtgcgcgccgcgcctgatatgctgggagctgtagtctcttcacggtttttagccaatgagtaggtagcttcagaactacaatcccagtatgcatgggggcggtgcgtagtcctggaggtaggggctgagaggtgtggacttaccggtgtccaaagcattgctagcagccaattccatgccgccccgttgccagggagagtgaatacagctagggacgtgaagggtaggtctgggctgggcattgaggagggtattaggctaggaagtatacctcacctttgtccaaatcgggtggttcggcctcctctcattggccctatgcagctgggttgcctctctcacccgcacccaagggtctttccagagtgttgcgtcatttccagcccagggagctgccttctttcctaaactgcaatggaaactgtcctgatgtctgagacaatgtccgttgtgccgcagccctctgccttctctagccagagcgcgagctcagctgcttttgagagaaatcagccacctggcccacctgtgcacaacttcagagctttgtagggggtgacaaggactgtgtcttcagggaaatgtcacgggcattagcgcctttttcgcaaatgtgaaagttgagaaatcaagaaggttaattattgggttgcccaagatctgctaagagcaaaggagaaaactccgtttcccaggcatgtgtcttgtgagccatttttaaatcaaccctcttaagtggacaagctccagaacacaacatgaagctgatgatgacttaggcaatttatgcttgaactcattggcctcatctcaagtcagtgtctcagagacacaggtgggacctgatccccaaggaacagatagcattccagattcatgggagcaacttttgagatgtggagcacccggggggtcatttgaaacccatcaggttgccgggcgcggtggctcacgcctgtaatcccagcactttgggaggccgaggtgggtggatcacctgaggtagggagttcgagaccaaactgaccaacatggagaaaccccatctctattaaaaatacaaaattagtcgggcatggtggcgcatgcctgtaatcatagctactcggaaggctgaggtaggagaatcacttgaatctgggaggcagaggttgcggtgagtcgagatagcgccactgcactccagcatgggcaacaagaggaaaactccacctcaaaaaaaaaaaaaaaaaaaaaaaaaggtgtgtgtaatcttcagttttcaagatgattacaaagataatatttatagaaagtatgcaaaataaaatacaatcaaagcatgccaatagaaagttaaataaaaattaagaaagtaaaacaggctgggtgtggtggctcacacctgtaatcccagcactttgggaggctgaggcgggtggatcacaaggtcaagagatggagaccatcctggctaacatggtgaaaccctgtctctactaaaaatacaaaaattagctgggcttagtggcacgtgcctgtagtcctagctactcgggaggctgaggcaggagaatcacttgaacccgggaggcagagattgcagtgagccgagatcacgccactgcactccagcctggtgacagagcaagactccgtctcaaaaaaaaaaaaaaagaaaccaagtaaaacagaaaatgagaaaaatataactactagaaacacataaaacaataacaatataactagtaataacttcatttccttaataaattattttaaatataaattaagtaaactacttaataaaatgaaatgtagtcttaggactttggaaggccaagatgggctgatcacttgacctgaggagttcaccaccagcttgggcaacatgggaaaactctgtctctacaaaaaaatacaaaaaagctagctgggtgcgatggcaaatacttgtaaatcagctacttgagaggctgaaatgagaggatcatctgagtttgggaggttctggcagcagtgagccctgcaaatcagcctggttgaccgaatgagaccctattgaaatacaaatgaggcctggcgcgttggctcatgcctgtaatcccagcactttgagaggctgaggcaggcagatcacgaggtcaggagttcgagaccagcctggccaatatggtgaaacccccatctcgactaaaaacacaaaaatcagccaggcattgtggcacgtgcctatagtcccagggacttgggaggatgtggcagaagaatcgcttgaacccgggaggcagaggttgcagtgagctgagattgtaccactgcactccagcttgggtgacagagtgagattccatctccaaaaaaaaaaaaaaaacctacactgaaaaaacacactaatatgaaacttcaaaacaataataagagaaatgtttactctcataaaacctggtatgcaacattgatgtatcattaaaaaaaacttgtcaggctgggtgcagtggctcacacctgtaatctcagcactatgggaggccgaggcgggtggatcacctatggtcaggagtttcagaacagcctggccaatgtggtgaaaccctatctcatataaaaatataaaaactagctgggcgtgatgacgtatgcctgtaattccagctgcttgggaggctgagacataagaactgcttgaatccaggaggtggaggttgcggtgagccaagattgcactactgcactccagcctgggtgacagggtgtcactccatctcaaaaaaataattaaaaaatatttgtctcagtaactgcagtatttagctgttactgtgtacttattaaatgcaggtattttgaatcattggcatgcactgtgtggcaatagaatttgagagaatatgcagtatagttataaatagattctaatgagaaacttttaataaaaaagcatttaaaaaactagagttactttttatgttttaaatatacattattcttacacaagatgaaactgctgaaatctaactttagaagcaaagaatagccttacttttttttttttttttttttttttttttttgagacagtgtcttgctctgttgcccaggctggagtgcagtggtgcgatctcggctcactgcaacctccgcctcccgggttcaaacgattcttgtgcctcacccttttgagtagctgggattacaggcgcctgccaccatgcccagctaatttttttgtatttttagtagagacagggtttcaccatgttggtcaggctggtctcgaacccctgaccttgtgatccacccgcctcggcctcccaaagtgctgggattataggcatgagccaccgcgcccgacctacattgttaaacatagaaaaaaaaaaatatatatatagatatatattttgcagaatagggttagaccctctgatgtgtaaaacatatattaggaaataaactatgttattatttagttataggctgaagaaagtagataaaaatcttataattccttattgcctgcagcaaacttaaatttataagtaactattttagtaaatatggagtgcctactaattatctcatttacttctggcataccatgcaaatcatctcacatctcacatctcttcatagtcaaaggtttttttttccttgctccagacaggtgatcaggtcttgcttagagacaacaatacctgttttattaaaaataagaaacataaatcttgctcgcattctctaattacaagctagtaatgtgctcggcagagaggatgtgataaaatagtctagtaaattaatacaaaaatactaagttataaaagaaatttctaaatatttagaaaatactttcaatttgtaggtttcttaattttactatctggtactattgaatcaaaaattggtggtggcaattagattttcaggtgcggcaacaatcaatattttatgccactaaatttctggaattgccactaatttacagtgaagaatacagctcaactcaggaatgtggaaagttaggattacgatgaaacatcttgaaattcttatctaaatgaacaaattttgaagattttctgggaaaaggggatctgaaactcttttatgcaaagaataaatgactaaaacacattctacaaaaatgagaaataaaacctttagggtatattatgaattatgtactcaagttatcctcaccaaggaagatcaggtttctgtagttctctaacatcacatccctatataaattccactgtgcagtgtccaggcaatgccactcctccagagagaattctatggccacgtctctaaattgcaatggtccctgaaacacacccacacacccacacacccacacacacatacatttttaccatgtggccatggacagaacttttaatttgacttaaggtgtaatgacaaagtaaagagaactggctctgacttatgggactgactaaaattatccaataaaataattttcaacacagaaatattctctaatgtattctctaactgagaaaaaagagcagcataagatccacaacatcagttcttataatgatatttttctagataataagtataaaattaagggcgtgaacagaacatgtgtatatatatattttttttttggagggggatggggtctcactctgttgctcaggctggagtgcactggctcaatctcgactcactgcaacctctacctcccccaggtgcaagagattcttctgcctcagcctccctagtagctaggattacaggcatctgccaccacgactggctaatttttgtatttatagtagagacggggtttcactatgttagccaggctggtcttgaactcctgacatcatgatctgttgggaacaggatccccaaaatctggccataaactggccataaacaaaatctctgcagcactgtgacatgtttgtgattgccatgatgcccacgctggaaggttgtgggtttaccggaatgagggcaaggaacacctggtccacccagggcagaaaaccatgtaaaggcattcttaaaccacaaacaataacatgagtgatctctgccttaaggacatgctcctgctgcagataactagccagactcattcctttacttcagcccatccctttatttcccataaggaatacttttagttaatctataatctatagaaacaatgcttatcactggcttgctgttaataaatatgtgggtaaacctctgctccaggctctcagctctgaaggctgttagaaccctgatttcccactctacacctctatatttctgtgtgtgtgtctttaattcctctagcaccgctgggttagggtctccctgaccgagctggtctcgggaatgatccacctgcctcagcctcccaaagtgctgggattacaggcatgagccaccgcacccagcctcacgaacgtgtatatttttcagtgctatattttcttcatatggaatgagttgtgaatatttttcagatggaaaagacatgttgtgttagaaggcacctctcaaattttaatatgtacagtaagttgaagaccttgttttgcaggtttcttttttccagaagatctttaataaagtctgatttttaaattaattaattaattgattgattttgagatggtgttttgctcttgttgcccagcctggtgtgccaccacacctggctaatttttgtattattagtagagatggtatttcaccatattggctagtctggtctcaagctcctgacctcatgatccacctgtccaggccccccaccaaactgttgggattccaggcatgagccaccatacctggcatttttagggaaattttattagaaaataaatatgtacacttagcaaggtaaaggaaatacaaattttacagccgggtatggtggcttacacatgtattcccagcactttgggaggccgaggccagcagatcacaagttcagtagtttgagacaagcctgaccaacctggtgaaacaccatctctactaaaaatacaaaaattagctgggcacagtggcaggcacctcacctgtaatcccagctactcaggaagctgaagcaggagaatcacttgaaccagggcagcagaggtttcagtgagccgagatcacaccactacactccagcctgggtgacagagactccatttaaaaaaaaaaaaagaaattataataacaattcttctgttcctaaatgtgccttcagatgtagaatcagaagtcacaacaatataaagaaagtggcctaaataaagcccaaggtgttggacacatctttttattgtaccaaccatatgatgcacaattcaattatttatccagtcgctagtgtagactaaaagtttctggattgtagaaactatgactgcttcatgtattttttttaatggccatgtgaaattgaagcaactagtttatctatttcggtcttcagatctcctccttctttattatccaagtaccaggaaactggagaaactctcatctgggtaccaaccaaagacacctcttgtatgaggggatgaacaaacacagatgactcatttctcatacactgagacagaagcagaattaaccactcttgtcagcctgacacaattctgcattgtacatcctcaaatgcctcaaagacacctaggtgattttgagggaattcccagtgaccctgggctgatagtccagtgataagccactctggagagactcaggctgattctaaatagaaaatggaactgccttggtggaactccagaacctggatcatttgtccttatttgctagctcttggataaaagaaagaacaaaaatactaatttttcaggtaaaatacaaaaatcacattttaaaggcaaatatagttgtggtcatggctctggatgttttgcggccttgatctctcactcctaagatgcttatttatagttacagattctgccatcagattctatttcctcctgggtcctctcacataactgtagcaggtgaacaagatatgaaaaatctcaaagaaccacactcccgaatgggggctgtaagatgtgtatgttgatatctcacaatgcagaaaatgccttttgttagttttctgtacattctttatccaaactccggcccttatttgtaaatccgaagcagagcccagaccttatctgcagattctaggtaggatccacctggctctgcatcctttggtgttacagcaagtggagtacaatcaaagaagagatcccctcatagaggctgctctagcacattctaaatgataagtctacatgaaaaaaaaaaagctgacacaagatgaatgtaagtactgtcaggcctctgagcccaagcctagccatcgcatcccctgtgacttgcatgtatacgcccagatggcctgaagtaactgaagaataacaaaagaagtgaaaatgccctgccccaccttaactgatgacattccaccacaaaagaagtgaaaatggccggtccttgccttaagtgatgacattaccttgtgaaagtccttttcctggctcatcctggctcaaaaagctccgccactgagtaccttgtgacctccactcctgcccgccagagaaaaaaaccccctttgactgtaattttcctccacctaccgaaatcttataaaacagccccacccctatctcccttcgctgactctcttttcggactcagcccgcctgcacccaggtgattaaaagctgttattgctcacacaaaacctgtttggtggtctcttcacatggacgtgcatgaaaagtacacagtttatttgggtcaagtttatggattacaacctgagagcaaagattcaagttgtctgaaacctctactgtgatcagcagcagttacaggaagatttgtaaagacaacaagagaggaacagagagtgggctgatacaaagttgattgtcagaaattgttatttatttacagaaataacattgattattaattagatatatatcattatggtttagggtatgggatatagtgtccaatgtggcattattagtttaatttttacctacctgtgccaatagtgaacagtttcaagagatgaatatatagttcaaaggggggagaaatacataactacactttcttttaactctctctgagtttgaagttcgtagaaatgtgatttagcctctctagaagtgactgtagaggactgtaagtaccaactaggcagatacacaattctgtctgcatatttagggaacagcatgcactgtgctacacaactgtcagttgactagaatcctcagagagaaagtcccttttagagtacattctggttggcaccttctgtgtgtacatcatgtctggtaattctagacagtgtttggaaacattaattaaaagaaaaatattctccatccccagagaaactccacaataatagaacagaaagaaaatggttttattacacaattaaacttgaatgtgacatgcatcatcatcagtctgcttaacagatcgcaaaaacataaagatggtcaccataattagtccacaagtagaagaatttacagcaccatgtcatacatagttcatgctaaattcacctggagaatgatgaggccatttgtgtatgctaattgcttatattcaatgacaaataaacttttcccatcttcattgatgcaataacatcgataaagctggagatcattattcttagaaaactaatgcagagcctgggcacggtggtttatgcgtgtaattccggcactttgggaggccgaggtgggtggatcacctgaggtcaggggtttgagacaagcctggccaatatggtgaaaccccgtctctactaaaaatagaaaaattagccaggcatggtggtgcgtgcctgtagtgtcaactacttgggaggctgaggcaggagagtcgcttgaacccgggaggcagaggttgtagtgagccgagattgcaccactgcactccagcctgagtgacagagtgagattccatctcaaaaaaaaaaagaaaatttttttatttatttacagaaataacattgattattgattagatatatatcatatatcatatatatatcatatatcatatatatatccttatggtttacagtatgggatatagtgtccaatgtggcattattagtttaatttatactactcgtgccaatagtgaacagtttcaagagatgaatacatagttcaaaaggggagaaagacataactgtacttctattttaatgtctgtctgagcttgataacaaaaagacttccatttttcagacaaaagttttttatttcccaaatctcaagacctcaattcaaaatttggagctacagatttagagcctgaattgctggagttgcagcaggtgttacctgcacgtttgttgggattttagcatgaggaggaaggggaaagtggagattctcatgtctacatgtctactcaatgcacacatgttattctgattaagtttctgggctttatagtatctgaatcagtttcaggtctaaagacacaagagtcagtgaaagaggtaaaataattgattgctactctctgaaacttggagaaatgtggtctagcctctctagaagtgactgtagaggactatagataccaaatcagcagagacacaattctgcctgcatatttaggggatggcatgcactgtgctacacaactatgagatgactggaagcctgagagggaaactctcctctagagtaaattctggttgacaccttatgtgtttatatcatgtctggtaattctagacaatgtttgcaaacaatccttaaaagaaaaattgggctgggcatggtggctcactcctgtaccactgcactctagcctgggtgacagagtgagaccttctcaagaaaaaaaagaaaacagcaaaaaagaaaaattttatccagccccagagaaactccacaataatagaagagaaagaaaatggttttattacacaattaaacttgaatgtgacatgcatcatagtcaatctgcttaacagttcacaaagacagaaggatggtcaccataattggtccacaagtagaagaatttccagcaccatgtcatacagggttcatcctaaattcacctggagaatgaaaaggccacctgtgtatgctaattacttacattcaatgacaaataaatttttcacatcttcataacaggaggtagttttgcagcttgaagccaagtgcctgctgaaggtaggctttcactctgctacaaaaaagtttcagtaggattctatatttttggctatttacattttagagcagtggctctgtactcactggcacttggctacagcactcctgcttgctttctcctggttgctagtgtcctctattcacctctaccatctgccactgaggcacagccaacagcacagctcacattttatgtgaaccccatttgccacagcagcactctagtgtcacatgagcgagtgaggcctgagctgcaggaggagagcctgcaggcctcatgggtagaattacaccttcacaataatggaaatgggagtagtgtttcagcctcagtttccacttataatggtgacaaggaaaaaatactgctgaatttccagcctgagtccagatagagatagctccaaaagttctcactgtgacagcccaccccattcagacaccatgggatactaatactaacagggcttctgaaacagacaaagcattggagagaaaaacagatctccatctgagcgagattattttgagagaagaaagttaaaaagattttaagaaaaagctcagattagatatgagattgatcaagtcagtcagaaaatattcccttaaaagaaatttctgtctaaacacccaaaccgcacagctactctcagcatgagaaacatgagcaatatgaagaaaggtggcagaatttcagaagaattttataaagtttcttttcgatctctgctgctttctcatctcctagccattgaataggggttctatctcttttttaccctctctctttttgaatgtattcaacaacgtttactttggtaatagtgcattatcaatactaaagctaattttaataacactttataaataaataaaatttgtcaattttgaccactccagatttacatatatattttgtaatctcttgtaattttttgtctgtatttcatttttatccatattcttttttttaaactatatttgtaatgctttatttcttttttttttttttttaattgatcattcttgggtgtttctcgcagagggagatttggcagggtcataggacaatagtggagggaaggtcagcagataaacaagtgaacaaaggtctctggttttcctaggcagaggaccctgcggccttccgcagtgtttgtgtccctgggtacttgagattagggagtggtgatgactcttaaccagcatgttgccttcaagcatctgtttaacaaagcacatcttgcaccgcccttaatccatttaaccctgagtggacacagcacatgtttcagagagcacagggttgagggtaaggtcatagatcaacaggatcccaaggcagaagaatttttttttttttttttttttttttttttttgagacagcgtctggctctgtcgcccaggctggagtgcagtggcgcaatctcggctcactgcaagctccgcctcctgggttcacgccattctcctgcctcagcctctcaagtagctgggactacaggagcccgccaccgctcccggctaattttttgtatttttagtagagacggggtttcactgtgttacccaggatggtctcgatctcctgacctcatgatccacccgcctcggcctcccaaagtgctgggattacaggcgtgagccaccacgcccggccgaagaatttttcttagtacagaacaagatgaaaagtctcccatgtctacttctttctacacagacacagccaccatccgatttctcaatcttttccccacctttcccccttttctattccacaaaaccaaccttgtgatcatggcctgttctcaatgagctgttgggtacacctcccagacggggtggtggccgggcagaggggctcctcacttcccagtaggggcggccgggcagaggcgcccctcacctcccggacagggcggctggcctggtgggggctgacccccacctccctcccggatggggtggctgccgggcagagacgctcctcacttcccagacggggtggctgccgggcggaggggctcctcacttctcagacggggcggctgccaggcggagggtctcctcacttctcagacggggcggccgagcagaggcgctcctcgcatcccagatggggtggcggggcagaggcgctccccacatctcagatgatgggcggccgggcagagacgctcctcacttcctagatgggatgacggccgggcagagatgctcctcactttccagactgggcagccaggcagaggggctcctcacatgccagacgatgggcggccaggcagagacgctcctcacttcccagacggagtggcggccgggcagaggctgcaatctcggcactttgggaggccaaggcaggcggctgggaggtggaggttgtagccagccgagatcacgccactgcactccagcctgggcaccattgagcactgagtgaacgagactccgtctgcaatccagacacctcgggaggccgaggctggcggatcactcgcggtgaggagctggagaccagcccggccaacacagcgaaaccccgtctccaaaaaaaaaatacgaaaaccagtcaggcgtggtggcgagcgcctgcaatcgcaggcacttggcaggctgaggcaggagaatcaggcagggaggtgcagtgagccgagatggcagcagtacagtccagcttctgctcggcatcagagggagaccatggaaagagagggagagggagaccgtggggagagggaaagggagagggagagggagagccattctttttattttttcaatttgaaacaccctttaagtaatttcaaactgttataggagatagaaagaaatcatttttgggaggccgaggcaggtggatggatcacttgaggtcaggagttcaccaccagcctggacaacatggtgaaatcctgtctctgctaaaaacacacacacacacacacaaaatttagggagtgctggctcacgcctgtaatcccaacattttaggaggccgaggtgggcagatcacttgaggtcaggagttcaagaccagcctggccaacatggtgaaaccccatttctactaaaaatacaaaaaaattagctgggtgtggtggtgcatacctgtagtcccagctactatggaggctgaggcaggagaatcacttgaacccagaaggcagagtagtgtaactgcccaaggggttcaccttgccctttgcctagacagagccaattcatcaagacaggaaaatttgtggaggaaaagttaaatattaaatttgaactcaattgaaaatggacacaaccaatggtcaccaagtcctggaacaggttgtgtgagccccttgatgcattcatccagcactgttttggagatatctctatttcaatctattccttttttttttttttttttgagacggagtctcgctctgtcacccaggctggagtgcagtggcgggatctcggctcactgcaagctccgcctcccgggttcactccattctcctgcctcagcctcccaagtagctgggactacaggcgcccgccactacgcccggctaattttttgtatttttagtagagacggggtttcaccgttttagccgggatggtctcgatctcctgacctcgtgatccgcccgcctcggcctcccaaagtgctgggattacaggcgtgagccaccgcgcccggctcaatctattcctatatattagttgttgaaaaacaatagagaattgcaaaagcaagttgacttttttgtgttgcttgagcccaatcatgaacgactctcttgactgggccttatgccaaacaactcattaccaaagagctagggtcccagagtgtgcccaagcttcatgagacctctcctcatctgtgcatagatgagtgtctgattctggagcccagactgttgcttcccactctggtggtgaatcctccatagtctggcgagcataatatatatatctcttttcccttctcctctttccattgcaatttgcttattgtatcaatctgcttatttcattgatttgcttatctcatttgcttattatatctgcatttccatttatgtaggataaagcttgttgacctttaaaggtattgtgtgtgtgtcttttcttctccccttgcgcgtttcccacacagaacatttttggcatcacaaacaggatttgaaaaccaaactgccacttttttgccacaatgacagagctggaaactcgaggaattcccatatccaggaatgggaactcccccagttctcacctttggggactgaatggttaaggggaactggtctttgtgggaactgagaatctaaattagtgcaatttaaacctttgactgtgcgggaagtgctgcaggggattccagtgagcaaaggagatgctgagggatctcccggagtggatggtgtttgcttactgcttataagttaatgtatcaagataggggctggttgctacaagagaaaaggtaagctggaaaaaaaaatgctaatccgacttccagactgaccctggcccaaagccaggcctatgtcttgactgatcaggctcaaagatatcagcctattgatgaaaaaagcagctgtcccaatggtcttatcagggtaaaattgaagaactaatcagctggggcctggagcaggtaaaaacccagctcttatctcaaggataggaaattaaccttagtaaaattcaaggacaagcacaaactgtaaaattcctcggcattctatggaatgcagggaaatagtccattttaccaaaggccaaggctaaaatactagaatttgcaacccctaccactaaaaaggaggcccagaaatgtattggcttgtttggattctggagacatgatattcctcacttgggtaacattttacaacctctgcatgcagccactagaaaacgctatgactttctttggggagagaaagagagcatggcttctgaacaagctaaacaagtgggtcaactggccctgggtctatgacctgtacggggtgggccagtagaactgcaagtaactgtcctaaatcaacatgctaattggagccttaggcagaagcaagatgggaagagggtacctttcaggttttggaaccagaaactgccagaggatgacaaagcttatacccgtttcgagaagcaattgttagcttgctattgggttttgctggaaacgaaacacctctgcttcaaccatgatgtctttatgaggcctgaaattcctactatgacttgagtcatgggttcccccaaaactcaccagatagggcatgcccaagaaagtagcatcatagaatggaaatggtatgtacaagagcatgctaagccaaagccaaagcgtatcatttttacatgaggatgtgcaaaacttgccagctcgggagatcaccaaggaagtcctgcaggtagggaaggaaacctcccccacccaatggggcaactcctttaaagtgtaaagcccaatcttgtattaacacgaatagactttcccttagatacctaaccttgtttttaacatgaatagactctcccttagctgagagaaccggaagaactccatttggctccttcatttacaagacatcaagtgctccttacccagcccctttcctcaaggacttaacttgtgcaagctgactctcaatatatcaaagagtgcaattaactgataaggtgctgaggcaagcgaagtccgctggaatttgctcggagatggtgccataaagcccccgcattttgtccggtagataacacgcagagcccccgcacctatcactttgtgatgaaataaaagcccctgcacctggaactgtttgttttcctgtaaccatttatctttttaactttttttgtctgtttttcttctgtaagattgctgcagctagaattccccctcccctctgtaaacccaagtataaaagaaaatctagccccttcttcggggctgagagaatttcgtgcgtcagccatctctcggtcgccggctaataaaggactcttgaatttgtctcaaagtgtggcgatttctaactcgctcaggtacaacaaaagaactaagcctagaggatcagaaacatgcttgatttatgatggatccaccaaatacattggtgggacccgatgctggaaggctgtggcttataaccctgttaaaaaggtaagcacttctgatgaaagaaggggtgggagcagcaagttagctgaactagtagccatcctctgagctatacaggaggaagccagagggatttgtcacttttttcatgcgcgtccgtgtgaagagaccaccaaacagtctttgtgtgagcaataaaagcttttaatcacctgggtacaggcaggctgagtccaaaaagagagtcagcgaagggagataagggtggggacattttataggatttgggtagataaattacagtcaaaggggggttgttctctggtgggcagagtgggggtcacaaggtgctcagtaggggagcttttgagacagggtgagccaggagaaggaatttcacaagacaatgtcatcagttaaggcaggaatgggccattttcacttcttttgtggtggaatgtcatcagttaaggcaggaacaggccatctggatgtgtacaggtcacaggggatatgatggcttagcttgggctcagaggcctgacaacttgtataccaacactttatcagtagcaaatggtcttactacctggatgctccaatggtaatgaaacaaattgttaattgggaataaagaggtttggggaaaacaatactgggaagatgtctgaatcctggcacacactaccattattgctgtcttccatgttgatgcccatgcatctctgctttctcttgacagactatttaatcaccaggaaaatcaacaggccaaaatttttattataactgcaaacttgaatgcagatgaatggattacaacgtgtttcaagccttgcaatgacaggcattataatggatggtggtataatttatagcgattagtggcctaaatgtgccacttaaaagatacagaatggtagaatggataagaatttaccaaccaaatatctgctatcatcaagagactcggccgggcgcggtggctcacgcctgtaatcccagcactttgggaggccgaggcgggtggatcatgaggtcaggagatcgagaccatcctggctaacaaggtgaaaccccgtctctactaaaaatacaaaaaaaattagccgggcgcggtggcgggcgcctgtagtcccagctactcgggaggctgaggcaggagaatggcgtgaacccgggaagcggagcttgcagtgagccgagattgcgccactgcagtccgcagtcccgcctgggcgacagagcgagactccgtctcaaaaaaaaaaaaaaaaaaagagactcacccaacacataaagactcacataaacttaaggcaaagggttggaaaaagataatcatgcaaatgtaccttaagagcaagcagtagtcgccattcttacatcagacaaaacagatattgaaacaaaaacggttaaaagaaagacaaagagggacattatataatgataaagggacaggaaactatcacaattctaaatatatgtggacctaacactggagctcccaatttattaaacaattactactagacctaagaaatgagatcaatgtcaatacaatgataatggggaacttcaatactctactgacagcactagacaagtcatcaagacagaaagtcaacaacaacaacaaaaaaacaatagacttaagctatagcctagaacaaatggacttgaaaaatatttacagaacattctacccaacaactacagaatatacattttattcctcagaacatgaaacattctccaagatagacatatgataggccacaaaacaagtctcaatacatttaagacaatcaaaattatatcaactactctctcagacaacaatggaataaaagtgaaaatcaacttcaaatgcaccctcacaaccatgcaaatacacggaaattaaatgaaaaataaaatttaggatcaacctgtttctgaatttttttgtatgaaatcaagatggaaatttaaaaattaattgagctgaatgataataatgacacaatctatcaaaatgtctgggatacaccaaaagtggcgttaaaaggaaagttcatagcatcaagtgcctacatcaaaaagtctgaaagagcataagtagacaatctaaaataacacttcaaggaactagagaaacaagaacaagccaaacccaaacccagcataagaaaagaaataacaaatatcagagcagaaccctagggggaggggtggctgcagtctctgtggacaagcagacttagcctttcctcctgctagttctgagcatttccagcagctcagatgagtgtatttgcccccagcaaaacactcctcctccaccaaacgacagtcaaagtgcttcattaaaagggttcttctccccatgcactggatgagacccctcaacaggggttgtcaggcaccctatacaggagtgatcctactggcttcaggttggtgcctcttgaggtcagagatcccagaggaaggtgcagacactcttctttactgctctgcagcctccttgagtgacctctccaggcactggagtgaaccagatgaatagggcctgaggtgaacccctagcaaggtgcagcaaccctacagaagagggacctgaccactgaatgaaaaacaaacaaacagaaagcagcaacaacagcatcaacaagaaaaaaatatacccagaaaaatcccacccaaggctgcacatggtggctcacaccataatccaaatactttgggaggttgaggcgggcagagcacttgaggtcaagagtttgagaccagcctggccaacgtggtgaaacctggtctctactaaaaaaaatacaaaaattagccaggcgtggtggtgcacgcctgttgtcccagctacttgggagtctgagacatgagaatcacttgaaccttggaggcggaagttgcagggagccaagatcctgccactgcactccagcctgggtgacagagcaagactctgtctcaaacaaaacaaaacaaaacaaaaaaatccaagggtcagcagcctcaaagatcaaaactagacaaactcatgaagatgagaaagaatcaacaaaaaaacattgagaggctagagtgcctcttctccaaatgatcaaaatgtttcttcagcaagggtacagaactggacagaggatgagatgcaggaattgacagaagtaggcttcagaagatgggtaataaaaaaactctgctgagccaaaggaacatgttctaacccaatataaagaagctaagaaccttgataaaaggttagaggagccgggcgcggtggctcacgcctgtaatcccagcactccgggaggccgaggcgggcggatcacgaggtcaggagatggagaccatcctggctaacaaggtgaaaccccgtcactactaaaaaatacaaaaaaaattagccaggcatggtggcgggagcctgtagtcccagctactcgggaggcagaggcaggagaatggcgtgaacccgggaggcggagcttgcagtgagctgagatcacgccactgcactccagactgggcgaaagagcaagactccgtctcaaaaaaaaaaaaaaaaaaaaaggttagaggaactgctaactataataacaagtttggagaggaacataaatgatctgatggagctgaaaaacacagcacgagaacttcatgaagcatacaaaagtatcagtagccgaactgaccaagcagaagaaagaatatcagtatttgaagaccaccttgtcaaaataaggcatgcagacaagattaaagaaaaaagaataaaaaggaacaaagaaagcctctgacaaatatggtgttctgtgaaggaaacacatgagggtagaagaaaagacacctacacaatacctttaagggtaaacaagctttatcccacataaatggcaatgcagatataagtaaattttttttttttttttgagacggagtctcactctgtcacccaggctggagtgcagtggcgcgatctcggctcactgcaagctccacctcccgggttcacgccattctcctgcctcaacgttctgagtagctgggaccacaggcacgtgccaccatgcccggctgattttttgtatttttagtagagacggggtttcaccgtggtctcgatctcctgacctcctgatccgaccgcgttggcctcccaaagtgctgggattacaagcgtgagccaccgcgcccggccaagtaaattgatataagaaaattgcaatggaaaggggagaaggaaaaagatatatatatatacacacacacacacataaatatatatatatacacacatataaatatatatatacatacacacataaatatatgtacatatatatacactcaccagactatggaggattcatcgccacaccggaatgcaacaacctgggctccagagtcagccacccatccatgcaaggacaaggagaggtctctttaagctttagtgcgttctggggctctaggtcattttgtaacaagttgtttggcatgaggcacagtggagggcccttgagactgggctcaaggaacacaaaaagttaacttgtttttgcaattggctattgtttttcaataacaatataaaggaatagattgaaatcgagatttctctgaaacaactctagatgaatgcatcaaggggctcgcagaacctattctcaggcttggtgaccatcgtttgtgtccacattcaattcaattcaaatttaactttttctccacctttggcctcaattggatactcaattgtaggaaaatacccttacagatacatagggaaggcatagtcgatatagattacagatacagggtaaggacaggagaattaaaagcacaattaataaaaaccacacccagcatggctttctaaggagagtcatattgtgagaattgccagggatatacacaccacatttagcatgcaatatggcacaaatccctccttgggctgcggtaagcatatctaatgccatttgattttgcaacacaacagtactcagctgagcaaatttatctggtaacaacataagtctagtgctaatatcattaagagctttttctacatataaccttaatattttagtttgttgctgaagcaggattgtaccagtggcaggggagaatactgtgatagggtactgccaccagggaggccagggaggctggcacattcataaccagtgatgtttgtaagtatctaaattacttgggagaggaatattaacccggatggtgaatggaattaatggctatccccaagttcatctccctgtccagtgtggggacaggtatcaccactcataggatctgcatacccagagggctcccccaggggacagcaatggagctactgtaatcacagtgtactcatgtattattaaagtaggaaagagattgtggttcactgggggcaatgttgatttggagtatgtgttgacaattgtctggagaaaccccagagtaatattagaggaaccttttaaggcctccagactaagcgggggctatagggaatccaggcaccagcacagctggtttccaaaatataccattccaggaatattgggcaggataccaaggcttttgatgaaaggagaatgtggagttcaccttttgtctgacttgggcaaagatagattgcttagtgtggtcaaaggaagtacaggttggactacaagtgttgttgtgaccccgttggtaactacatagccattcagaaatgttgtcaggatgattctccaaggtagcccattcctggcggcctttggcaactcgacgtatagaaaacattgtctgtgattggcttctattgcagcggtggctacccagttcatgaatttattcttggcctcagacacaaagacacaggtgctgaccattagtagatagattattccctgtaataacaaaaaaggataggaacatcatattgtttttcatctttaggaaattgtactatgccttcattttctgttttcacagctacaaggtcaccagacttaggggtgggatctgatggatgctgtacccatatattggctccaggatttaagctacatgaaccagtggatctgaatccccgagttctgtatgtagcctctgttgggacagagatttcctcaggggttaattgttgacaaggtaccactaataattgagcaacccacatttgtggttttatagcaaaagaatctggagtggtattgtataaaacaacctttaactctccccagtaatcaccatcaattataccaccaaacactataatgcctctcattgcaaggcttgaacacattgtaatccattcatccacattcaaatttgcatttatggtggaaattttggcctgtcgatcttcctgctgattaaatagtctgtcaagaaaagcagagatgcatgagcatcatcatggaaaacagatccaggagtggtggcccaagcctgtacttctaccaatttgggaggctgaggtgggttgttcacgaggtcaggagattgagaccaccctggtgaacacagtgaaaccccgcctctactagagaagtacaaaaattagctgggcgtggcggtgcatgcctgtaatcccagctactcgggaggctgaggcaggagaatcacttgaacctgggaggcagaggttgcagtgagctgagactcagccactgcactcaagcctggtgacccgagactgagccactgtactccagcctggtgacagagctagactccgtgtcaaaaaaaataaattaattaatacaggaaaacaatgataatggtagtgtgtaccagaattcatgtatcttcccagtattgttttccccatacctctttattcccaattaaccatttgttttgttgtcattggggcatccaggtagtaagaccatttgctactgagcaagagttggtatacaagtgacaaatccttcttccttcctttcgaagagctcagaggatgtctactagttcagttaactggctgctcccacccctttcttcatcagaaatggttatgtttttcggttgtttgtttttgagatggagtctcagtctgtcacataggctggagtgcagtggtgagacctcagctcattgcaacctctgcctcctgggattccagtgattctcctgcctcagccccctgagtagctgggattatagatgcatgccaccacacctggctagtttttgtatttttagtagagatggggtttcatcatgttggccagcctggtctcaaacttctgacctcgtgatccacacatcttggcctcctgtggattttgagggaactcgtgacctaaatcataacaggaaatttaggcctcataaagacatcatggttaaagcagaggtgttttgtttccagtaaagtccaatagcaagctaacaattgtgcacaggtgaggagagctgtcacgaagctttggcgcagtctgggaccctagctcttttgtaatgagttgtttggcacgaggcttagtcatgaggacccttcgcgactgagctgaagaaacacaaaaaggtcacttgtttttgggattgtctgttgtttttcaagaacgaatgtataggaatagattgaaatacagatttctctgaaacagcgctggatgaacgcctctaggggctcacacaacctgttcccggacttggtgaccattgtttgtgtccacgttcaattagcacaaatttattatttaactttgactccacaccagactatggaggattcaccaccagaccggaaagcaacaggatgggctccagagttggccacccatcggtgcacagaccaggagaggtataatgacgcttctgcgcggtctgggaacctagctctttttgtaacgagttgttcagcatgaggcctagtcaccagggcccttcatgactggtctcaaggaacacagaaaggtcaacttgtttttgtgattgtctattgtttttctttttctttctttcttttttttttttttttttgagacggagtctcgctctgtcgcccaggctggagtgcagtggcgcgatctcggctcactccaagttccgcctcccaggttcacaccattctcctgcctcagcttcccgactagctgggactacaggcgcctgccaccaggcctggctaattttttgtatttctagtagagacggggtttcagcgtgttagccagcatggtcttgatctcctgacctcgtgacccgcccgcctcagcctcccaaagtgctgagattacaggcgtgagccaccgcgcccggccttgtctattgtttttcaataacgaatgtataggaatagattgaatagattgacatagagatttctctaaaatagcactggatgaacgcctcaaggggctcacacaacctcttccaggacttggtgaccattgtttgtgtccacgttcaattgagttcaaattaaatatttaacttttcctccacaaattcccctgtcttgatgaattggttttgtctgggcaaagggcaaggtaaactccttgggcggttacacaacctccacctcctaggttcaagagattctcctgcctcagccttcggtgtagctgggactacaggtgtgcaccagcacgcccaggtaaggttttgtatttttagtagaaatggggtttcaccgtgttggccagggtggtcttgaactcctgacctcaagtgattcgccctctttggcttcccaaagtgctggaattacaggcgtgagccaccgcgcctggccctaaatgatttcctttctgtctcctataacagtttgaaattacttaaaagttgtttcaaattgaaaaaataaaaagaatgtagataaaaataaaatataaaaagttaaaaaaattacattagattacaaaatatatatgatgtatatgtaagtctcgagaggtcaaaaatgacaaatttgatttacttacaaggttttattaaaattagctttcgtattgataatacactattaccaaagtaaaagttttctcttgaacaaaaattttttgtattattaatatgacagccaaatacttctgttcaccttttgaatacattcaaaaagagaaagagtaaaaaagaattttcccatgctctccggtgggcctggctcagctcaaggaggaagcccggcctgaaaaggctgcagctgaggctgtgactctttcttcactcagcccagcatgtgatcacatcttctgtcactcagggactgaggaggcggggccttaagcattatccaatcagggacgctgggttggaaaccgtccaatcatgcaggcagctggagcgaagaggaaggctttcgggtttggcgcggccatttgtctcttgctgcagctggtgctccaaatctggtcttagctgcttcgtgtcttcttctccagcctctgtggccctgtgacctgcaggtattgggagatccacagctgagggacccccggaagcctagaaatggtgagagtgcctttccagcattccgagagaggggagggactggttggaaccgatgggaagtggctgtggcgggacttaggcctccccgcagtcagctccacaatctgcgaccgacttctccttgcccagttcggcctcagtccccttcagccataagatggcaacagcgccgacagccgggccccgcggcgtcctgtctcttccctgccctggcctggagccctctctgggcagctctgcacccacagcgctgcgtctctcccagattgtgcagggagcacgggagggttctcgggggagaatcctgactcggggtgcaggttcatgaatgggaagagctttggtccatggggttgacagtttctcttttctcctattaaaaacttatggggccggtcgctgtggttcatgcctgtaatcccagcattttgggaggtcgaggcgagcggatcacttgaggtaaagggttgttagtacaacgtagttcttcttcaaagacgcaacttcctggtcataagttggaaaagttgtaaatcacccctaccccttcttctcccttctccttttctcacaaatcgcgcattacccgatttggaaaaagcttgagtgtaagccaaccgggatcagcttagattgtgcggtctgaccccagccaatggagggaaaacaaaaacagaactgcattagggctaataaccccttcccggccaggcgcggtggctcctgcctgtaatttcagcactttggggcgccgaggcgggcggatcacgtggtcaaatttctagaccagcctatccaacgtggtgaaacctctctctactaaaaatacaaaaattagcctggagtggtgccaagcgcctgtaatcccagcaacttgggaggctgaggcccgagaattgcttgaactcgggaggcagaggttgcagtgagctgagatccctccatcgcgctccagcatgcgcgacagagggagagtcctcaaaaaaaaaaaaaaaaaaaaaagtaagcatcttaaaatttccatcctttatgtaaacactgtgttttagtaacttcactgtattttccaacacttagtttcaaaaacccagtgaataactctggcatggaaattaaagcttgaacctagtgattccgagctaaggctaatattaagcctgcaaaaggagggttttttttttttttttgagatggagtttgtccaggcagatgcagttaagattaagatgaaaggaaactggatgggtcttactgataatgatgttattgttttgaggcacttgtttgactttgtaaaataaaaacgttagatttatggaaaaaaatgaattccaaaaacatattgcaacaggaggaagtaccaacaaagtataacgtctttatggcttgcaaaaacgtaggcagaaaagtgctttcttccctagggaggagcaaagaagtttagaaaggaggtgggaggggaatggcaaatggagggtgcaaaagtcagattttatatcagagaatgtcttactctgaaatcagcatgttcttaggagggatgtaaaatgtggttgtatgttgactcagactgagggtagctcaaagttcaggagcttgagggaggcatataagcttaagaaaagtttcattgagaaatattttgttttaggccaggcgcggtggctcacgcctgtaatctcatctgctcggccaccctgtcccggccctgaagcgatgtaagcaagaagctgccctgctggaactgctccttcgggagactgctgattttggcattctttttcctttcatcgtatttcctctttttttttttttttgagatgaagtttctctcttattgcccaggctggagtgcaatggcacaatctcggctcactgcaacctccgcctcctgggttcaagcgattctcctgcctcagcctcccgagtagctgggattacaggcatgcaccaccacacctggctaattttgtatttttagtagagacagagtttctccatgttgaggctgcaagaattgcaggtcagcaagaattgctgcccaggggcagcacataatgggactagtaccaccgtcctgacggtgtgctgttgatgagcacgatgcaattcttcaccagggtcttggtacggactagctcgttattagatgtattgtagacaacatggacgatccttgttttaccagtacaacactctgagccacaggagaaattcccccgtccagcctcagggcaccgtatttcttcttacctccccacaaacggactgtgtggatgcggcgggggccaatcttggtgttggcagccgggcgccacaactcatccttctgcttcttgtggtagggctttctcttgcccctggacttgcagcgtttgtgccagttgtcccaagagatgcccatctctcagcgctggctggaaagagttctcttttctttgatctatgcatttcttccatttggcttttcctgggccacatcttatacattaaaccggtaaacatcactacagtgttttcctgagttctgtgaatagctctagcaaattatttgggtgtccccaattttcaaacaataggtgagaagcatagatgggccatggggtttgtgactggcatctgcagtgaggacaatgttgtgggactgagcactgaaacggggtctgtgctgactctgggtggtgtcagatttcaaatgttagataatgagttgttgttggagagttgtttgacgttcagcaaactctgcagatttggtgccagcaaaagatatcacggaggcctggcctggaataaaactctgggtgtttgggaataggaggctctcctgtacacaggctgtcacactgcccattgtcctgtgattccagatcttctcccagggtgacagaggactgaaaacttagaggaaaagagctctgatgacagacaccccccttttcttgcaagtgccacaataggattcccacctactcacaaacacacacactagacatagacgtgcccatactcctcccaggactaggcaccaccttcaggaacttcattatgccatttttttttctttttctgagacagagtcttgctcttttgcccaggctggagtgcagtggtgccatctcggctcacttcaacctctgcctcccaggttccaacgattcttctgcctcagcctcccaagtggctgggattacaagtgagtgccaccacacccagctaatttttgtatttttagtagagacttggtttcaccatgttggccacgctggtctcaaaatcctgacctcatgatccacccaccttgccctcccaaagtgccgggattacaggcataagccatcgcacccagccagcatttttgatcctagtgtttcttgccaagaacccacaagtgtctacaagtctcctggcatatccccacccccagacactgaatctgcagcagcaacctattttctccatcaacctaaaggtctggacctcctctttataatctcatctgcctgcatgcatacagaaataaatcagagtgtggccccacctgggccactatctgtagcgaaaatcagtctgttcatctacattgcagtctttcccacacagggatttgttttttttctttctttctttcttctttttttttttttgagatggcgtctcgctctgtcatccaggctggagtgcagtggcgagatctcggctcactgcaaggtctgcctcccaggttcacactattctcctgcctcagcctgctgagcagctgggactacaggcacgtgccactacccccggctaattttttgtatttttagtagagacggggtttcaccatgttagccaggagggtctcgatctcctgacctcgtgatccacccgcctcggcctcctaaagtgctgggattacaggcgtgagccaccgcgcctggcctgtttttttttcttgtagcttttatttttggtttagggtacacatatgggtttgttatacagctaaaattatgtcatgggggtttggtgtgcagattttatcactgagatactacgtatagcaccaaacatgtctgttttctgatcctcatggtcctcccactctccaccctctactaggtctcagtgtctgttattctcctgttgtgttcatgtgttcttattatttagctcttacttataaataataacatgcatttggttttctgtttctgcatttgtggggaaaagagagatcagactgttactgtgtctatgtagaaagaagtagacataagagactccattttgttctgtactaagaaaaattcttctgccttgagatactgttaatctgtaaccctacccgctaccctgtgcttgcaggaacatgtgctgtgtccactcaaggtttaatggatttagggctatgcaggatgtgctttgttaaacaaatgcttgaaggcagcatgcttgttaaaagtcatcaccactccctaatctcaagtgcccagggacacaaaacactgtggaaggccgcagggacctctgcctaggaaagccaggtattgtgcaaggtttttccccatgtgatagtctgaaatatgacctcatggcaagggaaagacctgaccatcccccagcccgacacccataaagggtctgtgctgaggaggattagtaaaagagaaagtcctctttgcagttgagataagaggaaggcatctgtctcctgctcctccctgggcaatggaatgtctcagtgtaaaacctgattgtatattccatctactgagataggagaaaacccccttaacgctggaggtgagacgtgctggtggcaatactgctctttaatgcaccagatatgtttatgtatgtgcacatcaaaacacagcacattttctaaccttgtttctgacactgagacatttcttcacgttttcctgctgacccttcccccgctattaccctattgtcctgccacatctccctctctgagatggtagtgataatgatcagtaaataactagggaactcagagactggtgccggtgccggtcctccatctgctgagctcttgtcccctgggcccacttttctttctctatactttgtctctgtgtctctttcttttctcagtctctagtcccacccgatgagaaatactcacaggtgtggaggggcaggccacccctttagcattagttttcttttttttttgttttttgttttgttttttgagatgaagttttgctcttgttgcccaggctgcagtgtaatgttgcgatctcggctcattgcaacctttgactcctgggttctagcgattctcctgcctcagcctcccaagtagctagtattataggcgtgcaccaccacgtttggctaattttgtgtttttagtagcaacagggtttctccatgttggtcaggatggtcttaagctcccgacctcaggtgattatcccacttcagcctcccaaagtgctgggattacaggcctgagccaccacgcccaggctctgcattagttttctaagaataatgatctccagcatcatcgatgttattgcaaaggacataatcatttcttttaatggccacagagtattcatgatgtttatgtatcatattttgtttttactaaatcttttatttttggagacagggtcttacttattgttcaggctagagtgctgtggcatgatactgacatacattagcctgaacctttcaggctcaagcaattctctcctacctcatcctcacaagtagctgggactacacatttgcgttaccacccctggccaatttttctttttgtattttttgtggagacaggattttgccatgttgcttaggctggtcccaaacttctaaactcaggcaatccaactgccttggcctcccaaaatgctgggaggacgggcatgagccaccacatttgaccataccatattttctttttttttttttgagacggagtctcccaggctggagtgcagtggtgcgatcttggctcactgcaaactccacctcccaggttcaagcaattctcctgcctcagccttctgtgtagctgggactacaggtgctggccaccacgcatggcaaattttttttgtatttttagtagagacggggtttcaccatattggtcaggctggtctcgaactcctgacctctggtgatccgcccgggtcagcctcccaaagtgctgggattacaggcatgagccactgcgccaggctgaccataccatattttctttatccagtctaccattgataggcatttacagcctgtccatgtctttgctattgtgaatagtgctgcaatgaacatgcatgtgggtatgtctttatgatataataatttatatttctttggctatatacccagttgtggggctcctgggtcaaatgaggattctgtttttagttctgtgaggaatcgccacactgctttttacagtttttgaactaatttacactcccaccagaagagtataagcattcccttttctctgcaaccttgccagcatctgttattttttgactttttaaaaatagccattctgactggtgtgtggtggtgtctcattgtgatttttcttttaatttctctaatgattagcgatgaccactttttttcatatgctagttagcttcatatatgtcttcttttgaaaagcatctgttcatatattttgcctaatttttaatgaggttgttcggttttttcttgtaagcttgtaggttgtctgtttactctgttgatagtttcctttctgttaggaagctcttaagttcaaatgggtcccattggtcaatttttgcttttgttgcagtagcttttggtagcttcctcatgaagtctttcccagtttttatgtctagaatggtatttcctaggttatcatggctgggtttcttataattttaagtttttcatttaattttttaatttatcttcagttgatttttgtaaatcaaaatgaaatgaaagggtccagtttctgtcttctacatagtgttaggtatttattccagcaccatttatgaaacaattcttcccacattcctcttgacagctttgtcagaaatctgatggcggtaggagggtggcattatttctggcctctctgttctgttgcattggtcttttttttttagacggagtctcgctctttggccgagactggagtgcagtggcccgatctcggctcactgcaagctccgcctcccgggttcatgccattctcctgcctcagcctcccgaatagctgggactacaggtgcctgccaccgcgcccggctaatttttttgtatttttagtagagatggggtttcaccgggctagccaggatggtctcgatctcctgacctcgtgatctgcccgcctcggcctcccaaagtgctgggattacaggcttgagccaccgcgcccggccagttgcattggtcttatgcattaataagtttcatataatatctttctctcttttggtttttccctcataaaccttctttcaagtgcatacattgtacaaatttcagatgtccaagagttcaaaactctttgaaaacttccaaaaatgtttttgctattccctctttttgtaaggaatttagattatatgtagatatttttctttgttttattgaaatatatgtaaatcatattaacagctaaataaaccttttgtcattttttctgactccagattatctttatctagtacttcagatttattactttgtttttgcttccaaaatgtttatttttttcatttttagtcctttagacagatttgtttagataaaagctcattttaatagcatacagaagcttagcacaaagagaattaaatttagcaatacagaatgataaagactaaaagatactaaatttctttgtcagaaacctgatgatccaaggtaattatccaatatttgcaggctgaagcacttgtactgcaaaagcaagaacagttcagtgcataaactgaacagtgcagtctgtagttgtaccttgctttctattacttcataacaattagtatagttatgtgtaatgtttgcagactacctgcattcatataaattaaacagtattttcttttcttttttttttttttttttttttgagacagagtctcactcttgcccaggctggagttcagtggcgtaatttcagctcactgcaaccgctgcctcccgggttgaagtgattctcctgcctcagcctccagaatagctgggattacaggtgtgcccaaccatgcctgtctaaattattgtatttatagtagggatggtgtgttatcatgttcaccagcttaatcttgaatccttgacctcaggtgatccacccgcctcagcctcctaaagtgctgggattacaggggtgagccataaacagtattttctacaatagtatgagtacaaagctgcactacttactttgaattaatcacttaaatggttattttaatatcattatttacacttctgaaatataaaatgttttaactgaagtatagttttaatttttaaaactataattttaaactatacacatactatatacatactatatacattatgactagttcattaaaatgatttatacttacttaagtctaatatccaaataaaatttataccaaattgttacattaagtagatattagtgtgacatgtttattactttattcaatagggattattatgagtaaacacaattttaatatcttttatttcactaaattggtatgctgctattacaggacaaataaagacaggtgatgtggccacccaaaaactataatggttcttcagtttgctatgttgcaagctctaatatgttccactatatgaacacagtcagattctatttcttcatcaaaaagtgttgcttgaagttgtcagatgtatttcaatatagaacctccattcaatggctaggagatgagggaacagcagagatggaaaagaaactttataaaattattcttaagatctgcctccttcataatgctcatttctcatgctgagagtagcttgcactttgggtgtttagagagagatttcttttaggggaatattttctgactgacatgatcaatcttatatctaatctgagctttttcttagattattttaacttttttctcaaaataatcttgctcagatggagataatgtttttctctccaatgctttgggtgtctgtttcagaagatctatttgtatcacatggtttctgaataagctgggctgtcacagtgagagcttttggagctatctctatctggactcatgctggaaattcagcagtattttttccttgtcaccattataagtagaaaggagttgaaacactgctcccatttccattactgtgaaggtgaaattttacccaggaggcctgcaggctctcctcctgcagctcaggcttcactctctgatgtgacactggagtgctgctgtggcaaattgggttcacacaaaaggtgagctgtgctctgggctgtgcctcagtggcagatggtagaggtaaatagaggacactagctttcgtgcgtgtctatgtgaagagaccaccaaacaggctttgtgtgagcaataaagcttttgatcacctgggtgcagttgggctgagtccgaaaagagagtcagcaaagggagataagtgtggggccattttataggatttcggtaggtaaaggaaaattaaagtcaaagggggtttgttctctggtggacaggaatgggggtcgcaaggtgctcagtgggggtgctttttgagccaggatgagccaggaaaaggactttcacaaagtgatgtcaacagttaaggcaaggaccggccatttacacttcctttgtggtggaatgtcatcagttaaggtggggcagggcatattcacttcttttgtgattcttcagttacttcagaccatctgggcatatacgtgcaggtcacaggggatgcgatggcttggcttgggctcagaggcctgacattcctgccttcttatattaataagaaaaataaaacaaaatagtgttgaagtgttggggcggcaaaaatttttggggggtggtatggagagagaatgggcgatgtttctcagggctgcttcaagcgggattgggggggcgtgggaacctagagtgggagagattaagctgaagggaggtcttgtggtaaggggtgatattgtggggatgttagaagaaacatttgtcgtatagaaagattggtgatggcctggatacggttttggatcaattgagaaactaaacagaagatacaaggttcaaataaaggaaggagaaaaatgggtattaaaggactaagaattgggaggacccaagacatccaattagagagtgcccaagggggttcagcgtaattacttgcttggttggcaagtttttgggctctatccttgagtttttttatgttgtcatacaccaggccagattgatttaggtaaaaacaacactcttcatttaagaatatgcagggtcctcctttttcagcagtgagtaagtcaaggcctcggcagttttggaggacaactgcagctaaagagtcaacttgggcctggaggactgataaagtttgtgatatgtctgtgatgctagcagagaagtcattacacaggctacagaaggtcgtgacagaggttgaaatgcctgctattccagtaccaagagcaatagtggaggcagaaagtcctaaacggaccatcaagggaattagtggaagaactcttttttgtcatgttggtgtcatgaggggaacagggagctcttcggtcctatttgcaaattgaattttgggggtaaggaagactagtgtacatgtgcctgtccaattagcaggtagacacatgtaggtagaggatccacagaggaagaagagaccttgtgtgaggcaaaactggagatgtaaagtaaaaagatgagaaggagtgctgaaaggggtgtcttgtacccagactcctagggatccagctagggcggcagctgtcagaggttgtaatggggactgatggggtaactgcatagagggggagttttgattttcatggtgtatgagaaaacattgagtatctatgagcaacctttcactgttattttcggggctgggtataagtaaacgagaagagggcctgggaggagagtctgacgagcaaggggaaggtagccaaggatggagtgaaatacagggcaagtgtcttcctaagcaataattgctgcgaatttttttaagtttgcctgtattgatagagggcttgtctgtaatatgcagctggaaggctccagttgtttcagtgatgtgtgtagttgggcttcggagatgaagagtaaaggaacatcgagaaggtaaaagattacctaggggaattccagtgggtctttgcggagagatacataaaggagtggccactggaatagtaatttgtgttgtgagaggtccaaataggggggaagtagagttaatataaggagaaaggttttttaaataagtgcgaaggagggcggcagcttgctgatgtgaaatgtctggggaagtcttgctggacctgtccagaaagtaaatgagttcttcaggagggtaaagttgagggctgttaaaggaagttcggaggtgtagggagacggggggtgttgcccagtctgtctgtaaggtggggacagctgtgtaggcactggaagaaagggaaatgcaaaggcagcagttgttcgccaaggagggattagaagcggctaggagagaatgggtaaggttgatactgtggtggagatagctggggagaggtagagggtgacataagaatgggaatgagaataagagtgagcataaaagtaaagagtagaacttcatcagggttggaagtattggagggtgccctgccagcaaagatcatctatccactctaagagggagttaagagtggtggtttggggatagcaccaagagatatcagctgtaatggcttgaagaaacagtgtaaactggcagtgtaaacaagagtagggcatttataagtagttgagaatggagaataggagtatgaccggacagaagatagtagggatgactagtttttggggctcggcctaagtggtgggggtgacttcgtaaagccctgttgcaaaaagtagggtaaggacgaacagacctaatagaatgaagggatgtattaggctcataagggttattactgttcttcagaaatacgagtgagtttaagggaagtgggggagagtacttaagtgggggagagtacttgtgacttctaggaggaagaggagggattaggctggctgtccgatggacacagctttattctggaatggtgaacccagtggggaggatcctgcaggcggacggcagtcggggactatagatgactaagtagggtcccgtccatcgaggttgtagagtttgaggggtcagattcttaacaacaactgatcgtccagctaggttgtcttcatatggctggcgatctggagtaggtaagagaagattagaagcctggtgaatttcctgtctagcctgctggaggactggaagatagtcacctagagggctggtgtctgggatgaggctggggccaagcaagaaagtgcgtccatataaaagttcaaatggactgtaccctgtagcatctcgaggacaggctctgattctgagaagagcaagaggtaaaagtactgtccaatcttttttaagttggaggctgagcttggtgaggtgtggctttaaaagaccattagtccgttctacctttcctgaagattgaggatggtaagggatatgaagtttccactgaataccaagagcctgagaaactgcttgggtgatttggctagtaaaggctggtccgttatcagactgtatagaggtgggaaggccaaaccgaggaattatgtctgacagaagggaagaaatgaccgcggtggcctttcagaccctgtggggaaggcctctacccatccagtgaaagtgtctacccagactaagatattttagttttctgactcgaggcatgtgagtaaagtcaatttgccagtcctgggcaggggcaaatccccgagcttgatgtgtagggaagggagggggcctgaacaatccctgaggggtagtagaatagcagatggaacactgagaagtgatctccttgaggatagatttccatgatggaaaggaaatgagaggttctaagagacggtctagcggcttgtaacctacatggaagaggttatgaaatgatgacagaatagaatgggcctgtgaggctggaagaagatattttccttggtctaagaaccatttgccttgtgtgggaagagattgataggtggaagtttccgtgggggagtaggtgggagtgactgaagcgaaggagaaaaactggctgtgagggacagaagttggagagctagctgcttgtctagccactttatcagcataagcattgcctagagcaatgggatctgatgccttttgatgccccttgcagtgaatgaccccagcttcttttggaagtaaagtggtcttgagcagagtttttattaaagaggcattaatgatggaggacccttgtgtagtgaggaaacctctttcagcccatatgactgcatggtgctgcagaatatgaaaggcatatttagaatcagtatagatattgatgcgtagtccttttgcaagagtgagggcttgagttaaggtaactagttcggcttgctgagaggtagtggagggaggcagagcggtagcctcaatgatagatgtggaagatactatagcatagcctgcctttgctggtgagtggtgattaggcctggtggaactgccatcaataaaccaagtgtgatcagggtgagaaacagggaagaaggaaatttggggaaatgtgaatgtcaggtggatcagagagatgcagtcatgagggtcaggtgtggtatccggaataatgtgggaggccgcatttaagtccaggccaggaacaatggtaattgtgggagactcaacaaagagtgagtatagcagaaggagccggggagcagaaagtatatgtgtcaggtgtgaggaagaaaatagattttggaaattatgagagctgtagagagtgagttgagcatagtttgtgattttgagggcctctacaagtattagggcagcagcagcggctgcacggagacatgatggccagcctaaaacagtaaggtcaagttgtttggacaaaaaggctacaggatgcgatcctggtccttgtgtaagaattcagactgcacagccctgcacttcggctgtgtgtaatgaaaagggttgggatgagtcagggagagctagaataggggcagtctctaaagctgtcttcaaggaatggaaagaggagtggggaaaggatttaggatctatggggtcagctaggtttccttttgtgagtttatataattgttttgttaggttggcaaaaccaggtatccaaaggtgaaagtatccaaccatgccgaggaaggaaaggagttgttgttttgtagaagggattggggtttgagagattagtcggatacgatcggcagggagagcatgtgtgttcttatgaagaattatgccgaggtaggtaacggatggagaagaaatttgagctttggagggggatacccgatatcctttggagaataaacactgaaggagcagaagtgtgtcttgttgagaagattcaaaggaggggctacaaagaagaaggtcatcaatatattgaataaggtgagaagcggaggggtggaaggaaagtagatcatgagaaagagcttggctgaagtaatgagggctgtccctgaaaccctgcggcagcacagcccaggtaagctgctgggactgatgggtgtcagggtcagtccaggtgaaagcaaagagaggctgggacgaggggtgcaggggaatagtgaaaaaagcatctttaagatcaagcatggaatagtgagttgtggaggaaggtattgaggacaaaagagtgtacgggttgggcaccacagggtggataggcaaaacaatttggttgataagacgcagatcctgaactaatctgtaagacttatccggtttttggacaggtaaaatgggggaattgtaaggagagtttataggttttagaagcccatgctgtagcaggtgagtgataacaggctttaatcattttaaagcatgctgtgggatggaatattggtgttgagcagggtaagggtgattaggttttaatgggatggtaatgggcatgtgatcggttgccagggaaggagtagagatgtcccatacttgtgggctaaggtggggggatatgagaggaagatgcgaaggaggcttttggttggggagaagggcggcaatgagatgtggctgtagtccaggaacagtcagggaagcagataatttggttaaaatatcttggcctaataagggaactgggcaggtggggataactaaaaaagagtgcataaaagagtgttgtccaagttggcaccagagtgggggagttttcaggggttttgaagcttggccgtcaatactcacaacagttatgggggcaaggaaaacaggcccttgaaaagaaggcaatgtggagtgggtagcccccgtatcgattaaacaggggatggacttaccctccactgtgagagttacccaaagctcggcgtccatgatggtccagggggcttccgaggcgatcgggcaatgtcaatcttcagttgctaagccaagcagatctgggaaggagtcagtcagagagccttgggctagagctttaggggttctaggagtggctgccgggtgagctgggcagtctgatttgcagtgagtccctgcacagatgggacatggcttgggaggaatcccgggctgcgggcattccttggcccagtggccagatttctggcacttgaagcaagatcctgatggaggaagtcttgtaggaatgcttgactgctgtggcttaggcattctgaagttctcctatgcaggaggtgtggctgggttttgtctcacagtaggggcaagtaactgtaactcagaaatgcattgccgtctggctgcttcctccctattattgtgcaccttgaaggtgaggttgattaattcctgttgtggggtttgagggccagattctaatttttgaagtttttttgtaatgtcaggagctgactgggtgataaaatgcatattgagaataaggcggccttctggcccctctgggtctagggcggtaaagcgtctaagggttgctgctaagcgggccacgacctgggctgggttttcatcttcaccttgggtagtttctttaagtttgtcataattaacagctttgtaagctgcttttttaagcccttcaactaggcaggaaaccatgtaatctcgcctagctatacctggggaatttgcctgatggttccattggggatcctctcggggaactgctctaatgccttcctggaggtctggctcgtgaagccggcggttatcagcatgagattgggctagagaagaaactctttcccattcatctggggagagggtagaagtcaggatgacatttaagtcactccaggttaagttgtaggacagagttagacattggaattcctgtgtatatttagtggggtctgatgagaaagagcctaaacattgactgatctgagaaaggtctgatagagaaaaaggtacatgtaccctgactatgccttcagctccagccacctctctaagaggaaattgttgggcaggtggggaagagctagtcgcggaactaaactgtaagccggaccgggtgtgaggaggggaggtgatagaaggattatagggtggaggagtggaggctgaggaagaattgggacttagctcggcctggcaatgagcagcctggggaggaggggaaaggtcagatgggtctgtagaaaaggaagactggaaagactcagcgatgcttggggttgggactgaggggacaggcgggagggaaagaaggaggatctgggaggaatcgcattgggaacagaggctagggagggaacgaagtgtgaaaaatgcctggacgtaaggcacctcagaccatttgcccatttttcgacaaaaattatttaggtcttgtaggatgaagaaatcgaaagtgccgttttctggccatttagagccactgtcgatttgtattggggccaagcagtgttgcagaagaaaataaggcatttaggttttaggtcaggtgtgagttgaagaggttttaagttcttgaggacacaggctaaaggagaaggaggaatggagggtggaaggttgcccatagtaaaggaggcaaaccaagagaaaagagagcatagagacacggagggaaggggttcggaggttcttaccctccagaaaagcaggaaggggggtcagggcatggaaataagggattggggcacagagataagaggttgggctgcagaaataagggattggggcacagataagaggttggggtgcagaaataagggattggggcacagagataagagataagagattggggcacagaaataagggattgggggttcttgccccctagaaaagtgggacttgccgctaagggtgaaggagaaggggttgaggggttcttgcccctgccccagaaaagcagagaaggggtagagacaaggagagaaggggttgaggggtacttgtcccttccccagaaaagcgggacttgccgctaagggtgaaggaccaaggcaggtgtccctgtgtggtctgacacccttgaaacgtgagtgtataatcagagaggcatccctgcaatgattaaacaccaagggaaggctgccttcccagtccgtgaccggtgccggagttttgggtccatggataaaacgtgtctcctttgtctctaccagaaaatgaaaggaattgaaattaagagaagggagagattgaagtgtggcgccaagattggaaggagaaagaggttgagggatagtgagggaggttggagaagagagtaaaaagaggccgcttaccggatttgaaattggtgagatgtttcttgggctggtcggtctgaggacctgaggtcataggtgaatctttctcatggagcaaagaacagaggacaggggattgatctcccaagggaggtcccctgatccgaatcatggcaccaaatttcatgcatgtccgtgtgaagagaccaccaaacaggctttgtgtgagcaataaagcttttaatcacctgagtgcaggtgggctgattccgaaaagagagtcagcgaagggagataagggtggggccattttataggatttgggtaggtaaaggaaaattacagtcaaagggggtttgttctctggtgggcaggagtgggggtcgcaaggtgctcagtgggggtgctttttgagccaggatgagccaggaaaaggactttcacaaggtaatgtcatcagttaaggcaaggactggccatttacacttctgtggtggaatgtcatcagttaaggtggggcagggcatattcacttcttttgtgattcttcagttacttcagaccatctgggcatatacgtgcaggtcacaggggatgcgatggcttggcttgggctcagaggcctgacactagcaaccaggagaaagcaagcaggagtgctgtagccccctgccagagtgtacagagccactgctctaagtagccaaaatgatagaaccctatttaaccttttttgtagcagagtgaaaccctaccttcagcaggcacttggcttcaagcagctaaaccacctcctgttatgaagatgggaaatgtttatttgtcattgaatatgagcaattagcatacacacatggcctcgtcaatctccaggtgaatttaggatgaactatatatgacgtggtgctggaaattcttctacttgtggactaattatggtgaccatctttctatctttgcagtcacttaagcagattgactatgatgcatgtcacacttaattgtgtaataaaacagttttctttctgtactattattgtggcatttctctggggctggagacatgttttctttattgtttccaaatactgtctagaattaccagacatgatataaacacataaggtgccaatgagaatttactctagaggggacttttcctctcaggcttccagttgactgacacttgtgcagcacagtgcacgctgtcccctaaagatgcaggcagaattgtgtctcagcctatttattaatctatagtcatctacagtcacttctagagaggctagatcagatttctataaatttcacagggcagcaatcagttattttacctctttgactcttgtattttcagacctgaaacggattcagagaccatggggcccacaaacccaattagagtaacgtgtgcattgagtagacatgtagataagagattctccactttcttctttctactctgctaaaatgctcacaaatgtgctataaacatgctgccactccatccattcttgccctaaatctgcagctccatattttgaatccaggtcttgagatttgggaaataaaaaactttatctgaaaagtgcaagtactttttctccctttgaactatgtattcaaatgtatgtatctgttgaaactgttcacaattgccacaagtagttataaattaaactaatgccacattggacactatatcccataccctaaaccataacaatatatatctaatcaataatcaatgttatttctgtaaacaaatataaatttctgataaacaactttgtgtcagcccactctgtgtttctcttattgtctttacaaatcttcttgtaactgctgctaatcaaagtgtagatttcaggcaacttgaatatttgctcccaggttataatccataaacttgacccaaataagctgtctacttatattcacgttgtgtcagctttttgtttttttcatgtagacttatcatttagaatgtgctagaacagcctctattaggggatctcttcaccaaaggatgcaaagccaggtggatcctacctagaatctgtagataaggtctgtcctctgccaggaatttacaaaaaagggtgggagtttggataaagaatgtacagaaaactaacaaaaggcattttctgtattgtgagatgtcagcaaagacagcttacagcccccatttgggagtgtggcattttgagattttcacatcttgttcattgacctgctacagtgatgtgagaggctccaggaggaactagcatctgatggcagaatctgtaaatgtaaataagcatcttaggagtgagagatcaaggccacaaaatatccagagccatgaccacaactatatttacctgtaaaatgtgatactggagtagagtatttttgttctttctcttatccaagagctagcaaatcaggacaggagatccaggttctggagctccaccaaggcagttccattttctattcagaatcagcctcagttcctccagcctggcttatcattgggccatgagcccagggtcactgagaattctgtcacaatcatctagatgtctttgaggcattggaggatgtcagagcagaattgtgtcaggctgacaagaatggttttttcttctgtctcagtgtaagagaaacgagtcatcctgtgtttgttcctcctgtcatacaagaggtgtctttggtacccagatgagagtttctccagtttcctggtacttggatgataaacacggagatctggagacccaaatagataagctagttgcttccatttcatatggccattaaaaaaaatacatgaagcagtcatggttccaacaatccagaaacttttagtctagactagcaactggataaataattgaattatgcaacatatggttggtacaacaaatacacgtgtccaaaatactgggctttatttaggccactttctttatgttgttgtgacttctgatgtctacacccgaagggctatttatgaacagaagaaatattattatgctttttttttttgagatggtgtctcactgtgtcacccagactggaattcagtggcatgatttcagctcactgaaacctctgccaccagggttcaagcgattctcttccttcagcatcctgagtagctgggattacagatgcctgccactgcacacgtttgagcagaccaattatgaggcaattctcctaactctgcttccagaagagtctccctatcaattactgaatacccattgtggttttttccctcaatcacatgggaggaacggtctatcatcctgtcctgaagggagttcctcctaggtcagctcagacttttgtatggtaatgaagatttaaatcccctgttaggaaacctgctggacactggtgtggccttcttagccttactcttttgtcttggacaactgtcctccagatctgtcactatctgaggcgtcccacgacaggcagtcactagatacttctcccagccactaagttgtgactggagaactttgctgtcttcacatgcttttctaattatgcctgaaagcccaaatcctttgttagggagagacatcctagcaaaagcaggggccattgtacactagaattaggagaaggaaaaagggtaaatatatatacagactctaagtatgcttacttagtcctccatgcccatgcagcaatatagagagaaggggaattcctaacttccaagggaacacctatcaaacatcaggaagccattaggagagtattattggctgtacagaaacctaaagaggtggcagtcttatactgctggggtcatcagaaaggaaatgaaaaggaaatagaagtgaaccgccaagcggatactgaagccaaaagagctgcaaggtgggaccctctattagaaatgattatagaaagacccctagtatggggtaatcccctccaggaaaccaagccccagtactcagcagaagagatagaatggggaacctcaggaggacatagtttcctcccctcaggatggctagccaccaaagaaggaaaaatacttttgcctgcagctaaccaatggaaattacttaaaacccttcaccaaaccttttacttaggcattgatagcacccatcagatagccaaatcattatttactggaccaagccttttcaaaactatcaagcagatagtcagggcctgtaaagtgtgccaaaaaaataatcccctgcactgcaggccatacatttcaatccctgtatcattaacctccttgttaagtttgtctcttccagaagcaaagctgtaaaactaaaaatgttcttcaactggagcctcaggtgcagtccatgactaagatctaccatggacccctggactggcctgctagcccatgctccaatgttgatgacattgaaggcacccctccccaggaaatctcaactgcatgacccctactacaccgcaattcagcaggaagaagttaagagcagtcattggccaacctccccaacagcatttgggttttcctcttgagagggggatgactgagagacaggactaactggatttcctatgcctgctaagaattcctaagcctagctggggaaggtgactgcacctgcctttaaacatgggacttgtaactcagctcacatctgacaaatcaggtagtaaagagagctcacgaaaataccaattagactaaaaacaagaggtaaagaaataatcaaatcatgtatcacctgagagcagagggggagggacagtgattgggatataaaccccaggcatttgagtcgggagtgcacaaccccctttggatcccctcccattgtatgggagttctgttttcactctattaaatcttgcaactgcacactcttctggtctgtttgttacggctccagctgagctttcacttgccgtcgaccactgctgtttgccgccatcccagacccactgaagacttccacccctccccctccggatccagcagggtgtccgctgtgctcctttgccactcccgattaggctaaaggctcgccattgttcctgcatggctaagtgctcgggttcatcctaactgcactgaacactagtcgctgggttccacggttctcttccatgacccacggcttctaatagaattataagactcaccgcatggcccaaggttccattccttggaatccatgaggccaagaaccccaggtcagagaacaaagggcttgcagccattttgtgagcagctgccaccatcttgggagtggcctgccaccatcttgggagctctaagaacaaagacccaccccttaactaaattgctggtgtctgtgctagaaaagggcacttgaggatgggaaaggagaaacttttatttttatcttcatggagcagcttattgtttttgaatctctaattgtttttgaatctcttctattttaaaggacataaatgggtggactttttctgtctttgtttttctgccatttgttgtcatgctaggaggtagacatgtggcactgacacctttaaaggcatattctccagatgcaggtgtaatttctccagagaatgtcatttgataaggaattccagagaaggaggagaaagaaaaaaaaatggcttttcttcaggtaaacatgtctcagatgcagagctgtgtccactttgcctcctggactgccatgcatttagcactcagaaaactttacatctgtacatgtgtttatcctccctaatgagtttggttgaactacttaaaattcttatggtagtcaagggtctctgaaaaatatttctttcctatattccagagccttctctacattctccatgtcatagcttcttatatgccatgcagaattcttagcaagaatttatgatcctcaatgtgggatacagtaaatttgtcctcaaaggtttcagcttgttaacttcctttaaaattgaagaggggaaattaagtacaatgagttctgaggttctcttcaaagaaccaaaatgtcagtatgttcatctttcctgttctttgttctctattttaaagttcaacttcctcgatcttaatgtctccttgctcctagtttcagtaaacaatcccttctaactcatgtatttagggtcgttagtcatccctagtcacctgctctgtcctgagtcactcctactcacctgacttatacccatccttcctgctgactattcatcccaccactctggctcttaccattgctctctttaaaatagccaatcagaattagcttagactgtggtccaaccctagccaatagcagaaagacacagcaatagggactagtggtgttagcgataaggcccccttcccctcccttgcccaagtgtactcttgccattgctccatctgtgagacacacccttctatagaagtatatttgccttgctgagatgttctctttttgagtgctcattttccctgagactctgagcaattgtttccaacatgcaatcttaaaaatgtttcctttgtagctgttgaacatgaaaagatatggatactcaagatttctactggggaaaactgtggtccttagttaagatggagaatatgtcatgttgaggctccatctgtgttccattagctctatgcagaacaggattaagaaaatgcttatttaaatggaatggcatttattacccagaaagttctgaaaaaagtattaggagatagctgctctctagggtgctaaatgacgcctacttaaaattcctactaaaaattacagaacataggagttatctgtactttgaagtttgtataaaacatgttcctttatggttaaattcatattttacttactttttttgggaggaatatgttggggtggccagaccaaacaccaggtcgtgggggtgacaaagtctgatggactcaatcctttgagtcctttgagaaaaagacagtttgagagagaaaggtgggacaccagggggccattgcgatcctcgaggctgtgaaggcccagagctctgggagcccacgctgtttattggtaatccaacagagaaacaggtggtgagaatgtggaggtcgaaaggacaggcacatgatctacagctgtgaaggtttagcatttataaggaacctgttctgctacttgagataatgggaataggagcctaggagggctagaagcaaggaaccagcaagtctagacacattccagaggacattatgtcagtcatgcaagccctgcctcagctttcttcccaaccctcaacttttttctcaacaggaatatttcaacagtgatgctgtattcttctgtgcgcattagcacatcataaaatttgtcctagtgcacttaatggtgaatgattcacttggtgaaatagctctgtaacagatttctttcactatagagttaattattttaagtatctttgtgcagctgatatgtataaaccagcacatttaatctggcagctgtccttttttcttattttttctacatatttttgtttggaaaatgaaggctctttgtttacaggccagaaaaactgggaaaaacaaaggttcttccacttggtggatgtttgacaaaatatccttcttgggccaaaaacattgacattattcgtgagcttgttagaaattcaaaaaatcagactttatttcagatcttctggaaaaaaaaaaagaacctgcataacaaggtcttcagcttattgtacatattaaaatttgagaggtgccttctaagtcaccgtgtcttttctgtctgaaaaatattcacaactcattccgtatgatctaaatatagcactcaaaaatgtacatgttcatgttcatgcccttaattttataatttattatctagaaaaatatcatatatgaactgatgttgtggatcctattctgctcttttttctcaggcaatatattagaaaatatttttgtgttggaaattgttttattggataatttagtgagtcttgtaagtcagaaccaattctctttactctccaatttcaccttaactcaaattacaaactttgcccatgaccacttggtaaaaatgtgtgtgtgtatatgtgtgtttttcagggaccattggaatttagagatgtggccatagaattctctctggaggagtggcattgcctggacactgcacagcagaatttatatagggatgtgatgttagagaactacagacacctggtcttccttggtgaggataagtggaatacataattcataatataccctaaaggttgtttttatgtttttttgtggaatgatttttagtaatgtattgtttgcataagagagttttagatcccccttttcctgaaaatcttcagaatttcttttagaagtgaatttcttcaagatgtttcatcttaatttaaactttccactttcctgagatgagctgtattcttcactctaaattagtggtaattccagaaatttagtggcataaaatattgttacctccacctgaaaatctaattgccaccaccaacttttgattcagtagcaccaggtaataaaatttaaaaacctacaaattaggacaaggcgcagtggctcacacctgtaatcccagcactttgggaggctgaggtgggcaggtcgcctgaggtcagcagtttgagactagcctaaccaacataaagaaactctgtctctactaaaaacatgaaattagcttggcatggtggcacatgcctgtaatcccagctactctgaaggctgaggcaggagaatttgttgaacctgaaaggcagatatttcactgagctgagattgcaccattgcacaccagcctgggtaacaagagaaactccgtctgaaaaaacaaaaaacaaacaaaaaacaaaacaaaacaaaacaaaaaaccacacacacacaaaagaaacctatgatttgaaagtattttctaaatcttttgaaattttttttataactctattttggaatttactagactattttatcacatcttctctgctgagcacagtactagcttgtaattggagaatatgaggaagattcatgttatttatttttaataaaacaggtattgttgtcactaagccagacctgatcacctgtctggagcaaggaaaaaaacccttcactgtgaagagacatgagatgattgccaaatccccaggtaggtgcgagtgaaaatgaatacaacagacaacacagataagaggtcccaaggtcaaagagaaagccggtccttaaaatgtgatttaggaagctgtgttccaaagagaatagttcctgggattctgttttttgttttgtttttaatttggctctcacaaagggacatcttctgtcttatgcttttaaattttctaaggattctacttttctttcggtgagcttccttcaacttcacagtgagagccagagtcctcttcatggcatataagagactgcacaatctggctgcttttacatcgtcttggggacacagaaatatctgcatgactttgagaaactaaactgtttttagtctttttgcatcaggcctgaaatgtgtgagggcagtagtatcagtttcatttctttgttcatttttctgcatggtccattctgtttttattactatatagtcttaaaatatcatttgaaagtataagtatgatatacttctgctctgttctttttgtcaagattgctttggctattcaaagtttattttagtttcatgtaaattttagaattgtattttccatttctgtgaaaaagataccactgcaattttgctaggaagtttattgaatctatagatcactttggataatatggcacttgaataatatttattctttcaatctatagacataaaatattttaaaatttatttggaacttctctaattttttctttttttttttttttttttttttggtaaagagtttttacctccatggttaattttttttctcagaaatttattcaatgctatagtaaataagattttttctttttattttatgagagtttaagtatataaagctgtacatatacttgtatgttaattttatgttttgctaatttactgagtatttattatttgagacagtttttactctgtttatgatttttaaaatataagattgtatgatctagaaacagcaactttttacttatttttcttcaatttcaatggattttttatttatttcactaattcttctgccacatatttccagtgctacattaaaatagaagcattgacaatgagcacaatatagttttgcattgctgtctgaatttgatgaagcaaatacctcttcaggttttctttttttgagacggagtcttgctctgtcacccaggctggagtgcagtggcgcgatttcgctcattgcaagctccgcctcccaggttcacgccattctcctgcctcagcttcccgagtagctgggactacaggcacccgccaccacgcccagctaattttttgtatttttagtagacacggggtttcaccgtgttagcctggatggtctcgatcttctgacctcgtgatccacccgccttggcctcccaaagtgctaggattacaggcgtgagccactgcgcccggcccaggttttcataaattggttttagaaggtaaagatcttttgttgggcccttagtgtgatgagatgccctctgaattgatagtgaagaggggttgtagcttggtcacaaggctgctgggtctgcactagggtccacctttagttggcttgttacaggggcttgggttgttgtaattctcattttatttttggacaggctgaatatccttcaggactttgctctgtagggcagacactagggcatgtttttgcagtcgggtctgcatatggtgggccttgtatcaggatgtggatgagtatggctctgactgagtaccagacagcatttcctcaggtaactgtgtgggtttctatgtgggcagaattggccatgatctgtggctcaggtaactgacactgagtcattgaaccgcttcagggaccccagtaaaggccaatgtcttcatgcctgcctgtatagctataattgggtgcctttctccaggtctctggagtggcagaacctcagccagactgtggctgggaggagtttgggatggttacagagtaagttctgaattctcagcgggaccaagttgggtaaataaacccgatcctggtctgtagccaagaacagcggccctttagtttcccacctaaatgagggcctgccttctgactagaaggcttctcaatctttagctttaacagcatttcacaactccctccctggatctcaaatctctcttagaggcccttattttggaatggcatcttgctgcataatgcatgcaggtctcaaaatcctggcctgaagcagttctgtaaccttaatgttccatgtagctgtcattacaggtgtgaaccataatacctttttctctcataaaggcatttttgtcagggatggctgacttttttttgctgtaaggggatatgaaaataggacaatttaactctttccttcttactgatgtcactctccatatacatttttactttctattttctatttcaaatttgtctgcaattttagtttcagatatttaggacaatatgccagaatttgatggtatacttgaagtgaattacataattattgggcacccaatatttaactaaatatgataaataactaaaatagttacttataaatcgaagctttgctgcaggcaaaaaggaattataggattttcatctacttttttcagcctatatctaaataatatagattatttcctaatatttgttttacatatcagagggtctaaccctattctggaaaaaaaatatatattttttctatatttaacaatgtaagtctactcttttcttctaaagttggattacagcagttgcgttttgtgtaagaataccatatatttaaaacatttgttttttaacaaatctagttttaaatgctaatttattaaaagtttctcattagaatcttctatttataattatgctgcatattctctgaaattttactgccacagagtgcatgccaatgattcaaaatacctgtatatgatgaatacatagtgatggttaaatattgcagttacttagacaaattgttaaaaaaaattttttggagaagtagttactctctctcacccaggttggagtgcagtggtgcaatcctggctcactgcaaccttcacctcctgggttcaagcaattcttgtgcctcagcctcccaaatagctgttattacaggcacttgccaccactcccggctaatttttgtatttttagtagagatgaggatggggtttcaccacgttggccaggctggtcttaaaactccttacctcatgtgatccactggccttggcctcccaaagttgctgagattacaggcatgagccaccgtgcctggcctgactactttttttaaatgatacattaatgtagcataccagattttatgagtaaacattcttttattattgtttgtagttctatattagtgtgtttcttcagtgtaggtttctcttttttttttttttttttgagatggagtctcattctgtcatccaggttaaagtgcagtggcacaatctcagcacaatctctgccttctgagttcatgccattcttctgcatcagcttcccgagtagctgggactacaggcgtgccaccacaactggctaatttttgtattgttattagcaacggtgtttcaccatattggccaggctggtctcgagctcctgacctcgtgatctgcccacctcagcctcccaaagtgctgggattacagtcttgagccaccgtgcccggcttcagtgtaggtttcttaacatcagtttattgtgtctattggttttacttatgtagtaagtagagaatttgcaattctttttgtatgctttaagtcaatttgaggtttagctaagagataaattatgcatctctatcacagtcagattacatatgtatgtgtgtttatctataaatatttagacaatttgcaattctgtttgtacactttaagtccatttgaggtttaagagataaattgtgcatgtctatcacaatcagattacataagtatgtgtgtttgtctgtaaatatgaccccaattttagatattttttcttagctgaatttcaatgggagttttatcttgtctaagtgagtagtcatggagatagtcttactttcaccatgtgtttaataattaatatatatttttccttttgtgagagaaacacttttgtgatctgaaggtaattttcagaaagatgtataattctggattttttttcaatttttctttaaaagcattgttttaaaaacacataacataaaatttaccatcttaaatttattaaagtgtacatcacagggtcaggcatggttgtggctctcgtctgtaatcccaggacttcgggaggccaagacaggaggattcctgtagcccaaaggtttgagaccagcctgggcaacatatggagacccatttctgtaaaaaaaaaaaaattaataatagccaggcatggtggtgtgcagctgtggtcccagctacatgggagattgaaggggagtcaaaattgtgcctctacactccagcttgggtgacagagtgagactctgtctccaaaaaaaaaagctgtttatttcaggcatgttgttatgcaaaagacttctagaaactttacatcttgcaaaactaaaacttagtacccattaagaaacaactgctcattttaccctctctccagcccttgacagacaaaccttccactttctgattttatgattttgactacttatttcatataagtgaaatcatacagtatccataattttgttactgtattaattcaagtgacacaatattctcaatgttcatcttaaaatgtgacaagattgttctttttaaggtggaataatattccattgtatgtatatgttactttttttgatgtttataaatcgggagacatctggattgctttgggcttttggcttttgtgaatacatatacaataaacatggattttcaaatatgttttccaggtcctgtgttgttttgctttgttttattttttttgagatggagtcttgctctgttgcccaggctggagtgcagtggtgtgatcttggctcactgcaacccctgcctcctgggttcaagcaattctcctgcttcagcctccctagtaactgggattacaggcacccactaccatgcctagctgattttttgtatttttggtagagacggggccaggctggtctcagactcctgacgtcaggtgatctgccccctcagcctcccaagttgctagatttacaggcttgaaccactgcacctggactttgttacatattttggatatagatttctaaatgaggaacatttataactttttaaaataatggctgtatctttgttttccaccaacgtttaacatgggtttcatttttattgcatcatcaagagattcgatgttttctaaaaaatttatagtggccattctaatgggtgtgaggtgattttgtttgtcattgtgggtttttctttttcagttctctataaatagttttttgtgccctttcaaatgctttttctcatttgtgtacttttctaatgaaaacttgtttatctatttctaaattaagttattcacctttattgtttagttttaagggttgtttatatattttgaatattaacttctttcacatgtaatttgcaaatgttttcacccattttctaaaggacgttgttactcttgaattgttttttaatatgcagaaattttgatgtctagtgtagttaaacttttctgttatttcatttattgctcatgcatttaatttcttatctaagaaaatggtgccatgaccaatgtgatgtctttttcctatatttttttgaaaggatttgttagttattttatttctcagtattttatttaaatactgagatctctgtgcctcagcctcccaaagtgctgggattacaggcatgagccactgtgcctggcctcctttatttttgagatagggtctcactctgtcaaccaggctaacttgcaaggctcagtgctacccaaacctcccaaattcaggtgatgatctcatttcagcctttcaagtagctgggttacaagtaggtgccatcaaaccctgctagcttttctgtattttttgtagagacagagttttgccatgttgcccaggctggccttgaactcctgggatcaagtgatcagcctatcttagccttccacagtactaagattacattttattttattaagtagtttaattaattcatacttaaaatgattgcttaaagaaaaattaccagttatataattattgtgttatgtgtttctaatagttatgttctcatttcctattttattttcttaattttcatttaattttgtactggtatgctttattttttatttgcttttgtatactttctataaattttatctttgtaatcatcttgaaatgtggagattacatacatcttaaagttaaaactatattttaatcttataagaacttcaattgaatacaaaaactatgcctctatattttcagcttataattgatattaaaattattttatatgctgtatttattaacagatttatgcagatttttttttttgggatggagtctcactctattgcccaggctggagtacagtggcatgatctcagctcactgcaacatctgcctcccaggttcaagtgattctccttcctcagcctcctgtgtagctgggattacaggcatgcaccaccatgcccgcctaatttttgtatttttagtagagagagcgtttcacaatgttggccaggctggtcgcaagcttctgaccttgtgattcacccgcctcatcctcccaaagtgctgggattacaggcatgagccgatgtgcccagtcgatttattcagattcacatattgttttttatattctataaaaaagaactttaaaggtttcatgtataataattttgattttttttttttttttgagactgagtcttactcttgcccaggatgaagagcagtgaagggcagtgggcactattgcacctggcctttttattattattatttttttgagatggagtctttctctggcacccaggctggagtggcatggcatgattttggcaaactgcagcctctgcctcctgggttcaagcaattctcttgcctcagcgtcctgactagctgggactacaggtgtgtgccaccacacctgggtaatttttgcatttttagtagagacggggtttcaccatgttgtttaggctggtctcagactcttgatctcaggcaatccacccacctcggcctcccaaagtgttgggattacaggcatgagccagcatgcacaacctcttgtagtacatcttgtaggactgcgcaaatgctgatgaaccctcttaacttttattttggaaagtctttatcttctttttgaagtaaaataatttaaaatcgagtattgctggttagaaatgtttttttgttacatcaaaatttgggaagttctcaacttttttgttttttttaatcttcaagtacttctgtatttctttttccctatattctaagatttcttttatgaatacattgatctacttgacggtatccaataagttttgtgttccatgttttactgctttttttgcaatttaatatttttgtgttatatatttttgggtatgtcacatcacagcaattaattgtggtttgatttttttgtttataattgtatatgacaatatttaactctgtaccacttaagacagtgtggagcaaaattaaatatgaataagccatatgtctattaccaatataattatttctgtttcttttcctgtataaatattatccctgtagttttgtgtcacttgtgtgtttgttgtgtaggtttgttgtaacggttttttatttttttttcttttttttttctcctttgagagggagtttcactcatgttacccaggctggagtacaatggcaggatctcagctcactatacaacctctgcctcctgggttcaagcccttctcctgcctcagccttccaagtagctgggattacattcgtgcactacaacgcccgcctaatttcattcatactttagtagagacagggtttcactatgttggtcaggctggtcttgaactcctgacctcaggtgatctgcccaccttggcctcccaaagtgctgggatacaggcgtaagccaccgcacgcagcttgtaacagtgtttttaatcctgtctaggtgagtagtcataaaaactctcctaatcttgccgtgtgcggtggctcacgattgtaatcccagcactttgggaggccaagacgggcggatcatgaggtcaggaaattgagaccatcctggctaacacggtgaaacccgtctgtactaaaaatacaaaaaattcgccgggcgtgttggcgggcgcttatagtcccagctactagggaggctgaggcaggagaatggagtgaacccgggaggcagagcttgcagtgagcggagatcgcgccactgcactccagcctgagggacagagtgagacctggtctcaaaaacactcctaatttcaacatcaatttccttgtgaatctatcttatttttgtgtgtcagaaacacttttggatttgaagataatttcaaaacaatactaactctgtatttttttaaggtattattgtttacttatgtgttatgtgtcaaaaaataataaaatttataataaaatatttctaggccgggcggggtggcttacgcctgtaatcgcatcactttcagaggctgaggcgggcagatcacaaggtcagaagatcgtgaccatcctggccaccatggggaaacatggtctctactataatacaaaaaattagccaagtgtgttggcatgcacctgtaatgccagctactgaggaggctgagacaggggaattggttaaacccgggaagtggaggttgcagtgaaccgatattgtgccactgcagtttagcctgggagacagaatgagaagtatatatttctaaatattcagtttgttcatattaattatattgacattgttatgcaacatatcactagaatgtttttatcttgcaaagctaaatctctatacacattaaacaactaccaattcttcccatttcgtggcactcttcaaacaccacattgttttctgtttcaaagagcataactgatttatatatcttatacaatatctgtctgtttgtggctggctcattttgcataatgtcatcaatatttatcttaataattgttagaatatgtgttgtatcatttctatatatttgtacatttattaattatttgtattattattttatactctaattccgtttttgtcatagaaagtaatctattttcagctttaaaaaatgtgttatgactttgtttttggcctaacaggtggtccataaagaagaaagttgtatgagctattgagaaggctgtgtatcctgatgttgttgaggagtgttctctataccttcattagaaataattgttttttactgccttctagtcccctgttcccttactaatattctgtcttgttttattattataacagaaaatgcattactgaaatagcctattataattatatttctctctatgtgtttattccgttttcttactatttgctttatatatttgaaaccctaatttgagacacacacgcacacaaatacacacatggataaacaaatttgtcataggtccccagcgaatgaatctacatattgtttaacatctttttgaagttttgacttaaattacattttataaaatatgacagtttttgacttaagatgtagcttgtgtaatactattgtgacctcttctgctctcatttggttaatatttacatgacatttctacttccatcttgccactttcagtctttttttgttattagatctcaactgactcttgtagaaaggcaagttaaatcttgatttcacaaaatttttaataaacttttttattgaaagaatgtctcttgattggaaagataattatacatataaaattttaaatagttttctgaaagagaaaagcttactaatgttattttattttttgttttatttgattcttgtatctttgtctctcattttcctttctgttttttttttttgtattaatatgctttcaggtttttaaaaattttcttttgtgtatctttacagatattttcttagtggtaccatgggggattctataaaaactctaaaagatccaacaatatatttgaatgtggtaaaaaaataacttaagttatatgcaaaaattcttcatcattacatctgctgctccgaaaatgctcttatatgtgaattttgaaattttacttatatatgtgtttgttataagtatctttatgtgtatcctagtttgtttgttcagcttttttatgtttacatcatttttcttttgataaatttttcagttactttttgtaatttttatatccaaaatttttattttttgctattttaatatttcttgttatcctcattttcctgatcttcagtagttgtctgtgtttccatttcacttactgtatattattatgttttatttatttctgtatttattttatctgagatggagtcattttctgtcaagctggaagcagtggtgcaatctcggctgactgcaacctctgcctcctaggttcaagcgattctcctgcttcagtctcctgagtagctgggtacaggtgctttccactatgactggctaagtttttgtatttttagtacagacagggtttcaccatgttggctatgctgaccttgaactcctgacctcaaatgattcacacacctcaggctcctaaattgctggtattacaggcgtgaaccactgtgcccagcatattttattttatttttgagacagtcttgctctgttgcccaggctgcagtgcagtggtacaatctccactcactgcaaccatcccctcccaggttcaagcaattcttgtgtgtcagcctcccaagcagcttggattacaggcttatgccaccatgcccagttaatttttgagtttttagtagatacagggtttcaccatgttctctaggctggtctcatactcctgacctcatgtgattttcccaccttaacctctctgtgttgaaattacaggaatgaccaccaaccctggcctgttcaatttatttggaattttaaaaattactttatatgctttttatagttgcttttgaaatgtttttcattgggccatgtttctctaatattttgtgtacattgcaatctttgattgagatttggacattgacaaaaagctacctgttacaatctttttataatatagctttgtcctggcatagtctgaaatcaatagtcttggctagagattctgggaatttctcaaacatgttcttaggatgtgtcttgtctaaattttgtgtttattgtttagttaaatggcttattttttttaataatcagtaatcacttgctgcagccattccctgtttggggtactgcagtttctctgcttctctaacatttatctttagactcagtagactcaaactgtcattccaatgtatatcaccacttctttaagcgttttatgtcatgggagacattaaccagtgtctaagaagcacatagaagccagaaataaagatgtatgtgccaatgtttttctttaaaaaaaaaaaaaaaagaattggcaacttacatttgtgtgtgtgtgtgtgtgtgtgtgtgtgtgtgtgagagagagagagagagacagaatgtcattctgttccctatgctgaagtgcactggcatgatcttggcccaccacattctctacctccacagttcaagcaattctcctgcctaagcctcccaagtagctaggattacaggtacctgttaccatgcctggctaatattttgtatttttagtacagatggggtttcatgatgttggtcaggctggtctcaacctcctgacttcaggtgatccacctgccttggtctcccaaagtgctgggattaaaggcatgagcctgggtggaaatttctttttctttgtttcgtttcttttcttttttttcctttcttttcttttcttttctccttccttccttccttccttcctttcttccttccctccttccctccctccctccctccttccttcttctggctctgctgcccagggtggagtgcagtggtgtgatcttgggtcaccgcaatctccgcctcccaggctcaagcaattctctgcctcagcttcccaagtagctgggatttgcccaccaccatgcctggttaattttgtttgtaaatgtaacctgtatttatcagaatctagcaattgaagtaatgtgttcttattgtttctttcagttatgtgttttcattttgcccaagatgaggttaattttgtttgtaaatgtaacctgtatttatcagaatctagcaattgaagtaatgtgttcttattgtttctttcagttatgtgttttcattttgcccaagacctttgtccagagcagagcctaaaagattccttccaaaaagtgatagtgacaagatatgaaaaacgtgaatatggcaatttagagttaaaaaaaggttgtgaaagtgtggatgagggtaaagtacacaaaagaggttataatggacttaaccaatgtttgacagctacccagagcaaagtatttcaatgtgatacatatgtgaaagtctctcatatattttcaaattcaaacagacataagataagagatactggaaaaaaacctttcaaatgtatagaatgtggcaaagctttcaaccagtcctcaacccttgctacacataagaaaattcatactggagagataacctgcaaatgtgaagaatgtggcaaagccttcaacaggtcctcacaccttacttcacataagagaattcatactggagagaaacggtacaaatgtgaagattgtggcaaagaattaaagtattcctctacccttactgcacataagagaattcatactggagagaaacggtacaaatgtgaagattgtggcaaagaattaaagtattcctctacccttactgcacataagagaattcatactggagagaaaccctacaagtgtgataaatgtggcagagcatttatttcatcctcgatcctttatgtacataagataagtcatactgaagagaaaccctacaaatgtgaagaatgtggcaaagccttcaagctctcctcaatccttagtacacataagagaatccatactggagagaaaccctacaaatgtgaagaatgtggcaaagccttcaggcgctccttagtccttcgtacacataagagaattcatactggagagaaaccctacaagtgtgataaatgtggcaaagcatttatttcatcctcactcctttataaacataagataagtcatagtgaaaagaaaccctacaaatgtgaagaatgtggcaaagccttcaagcgctcctcaacacttactatacataagataagtcatactgaagagaaaccctacaaatgtcaagaatgtgacaaagtcttcaaacgctcctcagcccttagcacacataagataattcatagtggagagaaaccctacaaatgtgaagaatgtggcaaagccttcaagcgctcctcaaaccttactacacataagataagtcatactgaagagaaactctacaaatgtcaagaatgtgacaaagccttcaagtactcctcagcccttagcacacataagataattcacagtggagagaatccctacaaatgtgaagaatgtggcaaagccttcaagcgctcctcagtccttagtaaacataagataattcatactggagcgaaaccctacaaatgtgaagaatgtggcaaagcctttaagcgctcctcacagcttactagtcataagataagtcatactggagagaaaccctacaaatgtgaagaatgtggcaaagcttttaacttgtcctcagaccttaatacacataagaggattcatattggacagaaagcctacatagtgaagaacatggcaaatctttgaaatattcctcaacccttaataaacataagataattcatactggagagaaaccgtataaatgtgatgactgttggaaagcctttgaccacccctctactcttactaaatatgagaatttatatgaaacataactcctacaaaaataaagaatgtgacaaatcattttaaggaagttctcaacccttactacacataattcatactggacggaaactctacaggtgtgaaaaatgcagcaaagcctataacaagttctcaattctttttttttttttttaagaaggagtttcatgcttctcacccagcctggagtgcaatggcacgatctctgctcactgcaacctcttcctcctggttcaagccattaacctgcttcagcctccaccaccatgcccaactaatttttgtatttttggtagagacagggttttgccatatttaacaggctggtctccaactgtgattcacacaccttggcctcctaaaatgctgggattacagtcatgagcatccatgcccagccacaagttctcagttcttaagagacatggtgataattcatgctgaagaggaactttacaaacttgaaagatgtgacagtgcttttaccaccacctccaacttttctgtacataaagatgattatactagtgtgaaaccctagaaataatagaaaatttgacaaatcctttatatggttgcaagacttgattgtaggtaagataattcatactggcaaaactcctacaagtgtgaagaatgtgggaaaactttttaatcagtgcatacaccttatttcacaggaaagctagtatccttgagaaaaattgcacaattataaaaaatatggaaaacccattaatgcctactcacatcttacccaacagaaggtggttcacagttaatgaaagcatttaaagtgcaattatgctcaagaaatctttcagaaaatagaagcctttaaagtgaagaagagtattctgaagacaaccattacacatataaagggggttgtattacctttacttgcatcacagatttcattgcacacattttgtactagaggaaaaccctgaagcagttgctccagctttgttcaacaacagggaatttatgttagagaagaatcctgcaaatgtagtgaatttggaaacaaattttttttcaaaaactacagcttagaaaacaccagagagttgatactaaaatatatgtttgcagaaacagtaaatataaaaaatatttaattcaaaatgaattccatgtaaatatcagagaatttacagtagaataaggcactgatacttcagacattacactaaaacagtgttgagtataaaaaagaatccacaacaaaaattgttagataaattatatatagctttaaaaggttttttgaagcattgtaattacattgaaagtatacttgctttcttgagaaaaaatttttgaaaagtgaataaggtaatagagctttcaaatttatgctgttactttatttctattcacatgtgaaagcatgtgatcaattgatgctgcatcagagatattacagattctttattgggcattccttataaccttttctattaaagagaaaggatattaaaatgtaagatgcatgatgaaaatataagtggacaggctgttcgtatttgacctatattaagtaatgtataaggtagtgttcagagtaatacttttctacattatagtgagagaaattatgaattacagttaaaggtatattaaattactgtattattttactaattttatgtaataaaatacactacattaaaaaattgttagattgtgtgtgaagttaattttgttgtatccatttatttttttttttgagatggagtccactttctcatccaggctggagtgcagcagcgcaatctctgtgtgatcattgcaaccttcacctcccaagttcaagcgattctcctgcctcagtctcccaagtagcaaggactacaggtgtgtgccaccatgcccggctaattgtttcaccatatcagtcgggctagtttcgacctcttgagctcaagtgatccacctgccccggcttcccaaagtgctgagattggcctagttttattttattttttaccatattaagactattttgcatttaatgaagccatattatgccactaactttaacctatcccaccttactcaagggtatagttacaagatggtagcagtatactatttggtatatagtagaataacatcattagtaatcactttgccagtggctttaaattaattgagttgaagaatatttttcccataggttaaatttttattcttacagaaatttattcttagtatttgtgggtatatagtatgtgtttacgtttatgctttatatggcatactgtgattcaggactacaatatgtagtaattacattagggtaaataaggtatccatcacgtctagcatttatcctttgtattacagtgtaattatacacttttagttatttgaaaatgtacaattaaattttaattgactacagggttatttttatggtcgtaataaaaattatacagaaatataaaaagaatatggccagatgaagtggctcatgcctgtaatcccaaccatttgggaggctgaggcagctggattgcctgacgtcaagatttcaagaccagcctggccaacatggggaacccctgtctctaaaaatataaaaattagccaggcataggagcacctgcgtggaggctgaagcaggagaatagcttgaacaagggaggtggagtttacagtgatccgagattgcaccactgcattccagcctaggcaacatttctgagtcctgaaaaattattaataaatatttgttacatagttttctataaacttgtggtttctctgcctgcaaacacaagagttttagttttaattttcatagagtgaaatatccacatattactctgaaggtaaaccttaggtgtaagaaaaatataaagtgagtaagtgtatttgtgagtttgctttggtacatattttcagaagaaaagcacaattattgaaacaaaacaacttattttaatttggtgaataacagaaaacaccttcaaaatgttgaaagcaaatctacactttctgctttgtattgaatttattaatgtaaaattttatagcttatgtttcaaattctttccagaatctgcctattgaagcacaggcaattttgtctccataaataacactcttgagtacaacaataaaagccctcttcaaacaaacaaattatttataacacttattttaatgaaaatgtaaccaaaagtatataattgggtatatttttgttgttctatgtgtgtgcgaatgtataaattggtacataaggacaaaataatttaagccagaaaaaaagatgttagctaatatttgtaatgaataaaactggaaagtagttaattattatttgcacataatgtctttgtttacgtagataacaaaacagcagaaagactattttaaaattttattcaagtgggtaggtaacattctaagataatacgctggattcccagtctgttgcacacctgctgtgtaatactttttccttgagtgtaaaaaaatgtgcaactggtgggaaaatcactcaagaaattaggttactcatgtgttgactttgtgtttatcaaaatggagattgtcctgactgtgctaaacttaatcagaggtgcttttaagagaaagacacatcatagaaaaacacccctgcttgcctgaaagtaagtgacttctaggtgggccatgttgcaagctgcttatggtgaccacatggcagaaaacatatttgtacattgttatcattcctgcccttctgcatgttgcttccagtagggagaatctaaggatcctatgacagggaaaaaaaggaaatctcattcatgcaagaaataatcacctctcacctgggatagcttaagagaagcaggagaccacaacagaaccacataaatgggaggaaaatggtaacctgggtaaaagtgctctctggcattatggaacaacatttagtaagctgtagtgaatggtcagcctctgggataccaatagtttaccaacaaggctgaactcattctaattcaatcagcatgtctgcatttacactatccattacagaaataccatgaagaccagtgggtaatgtcctagaattgaacttatttcaaatcatacctaattgtttttcacatttgaaaaaccttaaaaacaatgaattcataaataattaacttctaattatagaggattctactatactgtaatacaagattaaagtgtaaacaccttaagatttcttgaatgcatgattggttatgtagtttattttaaataattaacgtgataaaagtaacaaatagataaaacattggaaacggacaaaattaataaaaaccacatcttttcaatggcttggcgtaattgctatgcttttggaaatggccagattactaacaagaaacaaaaacaagattttggctttgctcagtcattgtttttgaccttctgaaatctaaaatccaggccaaagtgttgaatgggagtattttataggtggcttccttgggtttccaatgcaatgaagggaaaactttgataggcaggaaaatgcacactatatacacacattgctcttctctgatttgctttaacattgaaaaattgaagattgtaaatgtagtctcaattagagtaaattaacaaaagatttgtttttcaaaaagcaaatgtataaaattaatgggtaacagatgccattagctgctaaaaaatagtatgactaaattcagtaagtatctagccatgcaaataacagcccaattaaatgaagaccctcataggtgcatgtggaaagcattgctgtgcagtgtggtgcctccactcagcattttcttctacctcttcacagagaaaccagtttcccctgagtgactaaggatgcatactgggagctgagaatgctgtgttcagagtgattactgaaaacatggttaacacacttcttccatatgataataaaatgatataaatctttctctgcctcggaaaagcttttagtaaaagattattcaatttaggttcatgaaaaatgttaaattccagataatttagacacttaaatgtcaatgaaatcccataaaacatatttgaacagtgtttgacacgagtcgcaccgaaacaaatgctcttcacgatcattgttaaagtagcaatagcgccacgtgctttcctgggaactgctggcctgttttccactcatacaaagtggagaaggctttgaaatagcaaaggagggtgacataaattgaatacttatatgaaatttttaattaaaaatagcatttgatgttatacaactataagtgagactattagtgtgatgtcatattcttaattatattgacaaaataaccattcacagtattcctatttaaaataacatgttttgtcggctgtatatttgctagcttttggttaaatagtaccagagctcaatagcaatcaacaaaatgaatctttattttaccgcaagcattagtgatgcatatgcctgtttttcttaaagttcattagctttttgccttttccggttgcagcgccgcgcggtgaggttctctagtccacgctcgcagccatgccgtccaagggcccgctgcaatcggtgcaagtcttcggacgcaagaagacagccacagctgtggcgcactgcagacgcggcaatggtctcatcaaggtgaacgggcagcccctggagatgactgagccgcgcatgctacaatacgagctgctggagccagttctgcttcttggcaaggagcgatttgctggtgtggacatccgtgtccgtgtgaagggtggtgctcatgtggcccagatttatgctatccgtcagtccacctccaaagccctggtggcctattaccagaaatatgtggatgaggcttccaagaaggagatcaaagacatcctcatccagtatgaccggaccctgctggtagctgatccccgtcgctgcaagtccaaaaagtttggaggtcctggtgcccgtgcttgctaccagaaatcctaccgataagcccatcatgactatcaaaattcacctgtataataaacagtttttgagggattttaaagtttccaggaaaaaaaaagttcattagctttttatgaaggatttatccttttttttcagtgtgctgtttattgctgagaagtggctgccctgccagaaaactgctattctcagctgtaaccacattgactaatagtgagtggaagtgcagtggataaaaagcaaatgtgtcttctctgtatcttttttcatttattggctgaagaacaggaggatgcggaagatggaagaaaatataatctctgaaagataatgaagaagctctcctaaatagaagaaaacctcataggggatttttttttcatcattttactctctgcttctatgcgtttaaattttttttttttttttttgagacagtctcgctctgttgaccaggccagagtgcagcggcatgatcccgactaactgctccctccacctcctgggttcaagcgattctgcctcagccttctgagtagctgggattacaggtgtgtgccaccacgcctgactaatttttgcatttttagttgtggtgcggtttcctcatgttggtgaggctggtctcgagctcctggcctcgtgatttgttcaccttggccttccaaagtgctgggattacgtgcatgagcccctgcacctggtgagtttaatttttttttttttacactttacatagaaataggattatgtggactgggcacggtggtctataatcagcactttcagaggctgaggtgggtggaccacttgaggttaggagtttgaggccagcctggccaacacggcaaaacactgtctctactaaaaatataaaaattagccaggagtggtggtgtgcgcctgtaatcccaggtatgggggaggctgaggcaggaaaatcgcttgaaaccaggaggcagatgttgcagtgagccgagatggtaccactgaaccatcgcgtgcctaggcaaaactccatttcaaaaacaaaacaaaaaaattttgtgtgtgtgttttcctgtgctggcttattttacttagcataatatcgttcaggttcatgaatgttgttgcaaataacaagactcttatttttaaggactgaatagcattgcattgtgtacatacaccacattttctttttccatttacctattgatggacatctaggttgattccataccttaggtattgtgagtaatctgcttctttccttctcttttgttttgtttttgttttgtttcagatggagtctcattctgtcgctcaagctgaagggcagtgccgtgatcttgacccactgcaacctccgcctccaaggttcaagcaattctagtgcctcagcattccaagtagctgagattacaggtgtgcaccaccaaacccggctaatttttgtatttttagtagaggcaggctttcaccatgttgaccaggctgattagtttgtatatttctttcttcctttccttttttatttctagaagcatgttaattttaaaatataaattatgacatgtaaaagccttcatttctctgtctttgattactattatggctgatgaaaaaataagcttttttgaaatttcctggataaaagttattactttatattaacataacttgagacaatgtagaaatgaaaatgaacatttgatagtaaaacagcaattatctagctcctggtagtcatttagtctctcacccgctctttagaacttccaccaagacaagaactctattttttttccaagaatgtgtgatgtaaaatcacactcttatctttttgtttttgtggcagaagttgggtatttaaggttatgaaaaaaaagtataggtctccttttagtagacaggtgatgatggaagcaaatataatagtacatggtatttggccacatttcaaatgggtgatagtgaacattcactgaagtgtcatagatggctcttatttgccaggtcaaatcttctttgcgagaaagtctcagccaactgttgtcaagcatttctggtggttcctagatacatgaacaaaacctcactagactggtttactgagagcagaattaaaaacacccgggtgccaggttattaaaaacatttttacatttttacatttatggaaaaaaaaatgtgatgtggtgtgtggcttggtttgaatacatcttcactgagctaagtagctgattgaatttacctaacctgaaggaaaaaaaaagaaaaaagaaaaaacctacactgaaaaaacacacatggaactgcaagacagtgattaagaaaaatgtttactcataaactctggtacgcaacatcgatgtatcattaaaaaagtttgtcagtttgggcatggtgtctcacgtctgctatctcatcactttgggaggccaatgcaggtgtatcacctcaggtcatgagttcaagaccagcctggccaatgtggtgaaaccccttctctagtaaaaatacaaaaattagctgggcatggtggcacatgactgtaatcctagctacttggcaggctgaggcatgagaattgcttgaacctgggaaatggaggcagcaataagccaagatcacaccactgcactccagcctgggtgacagatcatgtctctgtcaaaaaaaaaaaaaaaaaaaaaaaaatatatatatatatatatatatatatatagtctaggtaactgtaatatgtaactgttacggtgtactcaccaactgcagatcttttgaatcattggcatgcactgtgtggcagtaaaatttcagagaatatgcagtatatttatacatagaagattctaataagaaactttccataaggaagcctttaaaagaaacttgagttactttttatgttttaaatgtatgctattcttacacaaaatgaaactgctgcaatccaactttagaagcaaagaatagtcttacattgttaaatatagaaaatatataactattttaagaatagtgttagaacctctgatatgtaaaacaaatattaggaaaaaactatggtattatttgatataggctgaagtaagtagatgaaaattctataattcctttttgcctgcagcaaatttaaatttataagtaattattttagtaaatatggagtgcctactaattatctaatttatttcaggcataccatgcaaattctagcatattgtcctaactgtataaatctaaaattatagacaaatttgatatagaaaatagaaagtaaaaatgtatagggagagtgacatcagtaagatgaaaagactaaaagtgctcattttcatctccccttacagcaaaacaatgtcagccttccctggcatgcctttattagagaacgagacattatggctcacacctgtaatgacagctacatggtacattaaggttatggaactgcttcaggccaggatatggagaccagcctgggttatgtagcaagacgccatctccaaaataatgtctctaagagttatttgagatccagggttgcagttgtgaaacactgttaaagcttaagattgagaagtgttctattcagaaggcaggtcctcattcatgtgggaaactacaggaccgctcttcctggctacagaccaggatcgggttcacccaacttggtcccagtaagaattcagaacttactctgtaaccatcccaaattcctcccaggtacagtctggcagaggtcttgccattccagacacttgggaggaaggtactcgtttacagccatgtagacaggcctgcagaacttggcctttactgtggtccttgaagcagtttaatgactcagtttcacttacctgagccacagttcatggccagttctgcctacatagaaacctacccaattacctcaggaaatgctctctcatatacagtgaaagccacactcatccacatcctgatacaaggcccaccatatgcagagctgactgaaaaaacatgccctagtgtctgccctatggagcaaagtcctgaaggatatgcagtgtgctcaaaaataaactgggaattacaactacccaagcccctgtaacaagccaactgaaggtggaccctagtgcagacccagcagccttgtgataaagctgcaacccctcttcactacaaattcagagggcatctcatcactctaagggcccaacaaaagaagatctttaccttataaaatcagtatatgaaaccctgaagaggtgtttgctccatcaaattcagacaccaatacaaagctatattgtgcctattgccaatgcttctattttaatgtagcactggaagtatgtggccgaagaactagtcaaagaaataaaaaaatccattgaaattgaagaaaaataattaaggtgctgctgtttgtagatcatacaatcttatatttaaaaaaaaccataaacagtacattaaaacctgtctaaactaataaatacactcagtaagttagcaaaatataaaattaacatacaagtatatgtatggtttcacacacttaaactatctaataaaatagaggaagaaaataatcttatttatttatttattttgagacagtctcagtctctctccaggctggagtgcaatggtgcgatctcggctcactgccccaatgtcagtgaaataaatggttaattgggaatagaggggcttggggaaagcaatactgggaagatatctcaatcctggcacacactaccattattactgttttcctttttttttttttgacacggagtctagctctgccaccagactggagtgcagtggtgcaatctaggctcactgtaacctctgcctcccaggttcaagtgattcccctgcctcatcctcccaagtagttgagactacaggcacatgccaccatgcccagctaattttttgtatttttagtagagacgggatttcactgtgttagccaggatggtctcgatctccagacctcatgatttgcctgcctcagcctcccaaagtgttaggattacaggcatgagccactgcaaaaattttattttctaaagcattaaatcataaatttctgaggaaaaaattaaccaaggagggaaaaaatctttacaataaagaaaaaataaaaaaattagagaagatacaaataaattttaaaatactttgtctatggattgacataatattattaaagtaccacattatccaaagtaatctatagattcaataaacttcctatcaaaattgcagtgattttttttcacagtaatggaaaatacaattctaaaatttacatgaaactaaaataaactttgaattgccaaagcaatcatgaagaaaaagaacagagcaggaggatatcatacttaaaatttcaaactatatttcaagactatatagtaataaaaacagaatgtactgtgcagagaaatgaattaaaaaaatgcaacagaaactactactctcacacatttcagacttgatgcaaaaagtgatctaatgcataattttcttttttttttttttttttttttttgagacggagtctcactctgtcacccaggctggagtgcagtggcataatctctgctcactgcaacatctgcctccagggttcaagtgattctcatgcctcagcctgcctagtagctgggattacaggcacccaccaccatgcctggctgatttttgtatttttagtagaaacaaggtttcaccatattggccaggctagtctcaaactcctgacctcaggtgatccacctgcctcggcctcccaaaagtgctgggattacaggcgtgagccaccacgcccagtctatgcagtctgttatatgtcatgaagatgaatttggctctccctgtgaagctgaaagaagctcagcgaaagaaaagtagaatccttatttaaaagcatcagacagaagatgcccctttgtgagagccaattaaaaacaaaaaaataaacaaacaaacaaaagcagctttccacgaatgatttcctttggaacacagcttcccaaatcacatttaaggactgactttctctttgaccttgggacctcttatctgtgttgtctgttgtattcattttcttcttttttttttttgttttttttgagatgactctgtcacccaaaatggagtgcagtggcataatcttggctcactgcaacctctaccttctgggttcaaagcgattctcctgcatcagcctcctgtgtagctgaggttacaggcgcatgacactatgcttggctaattattgtatttttagtagagacgtggtttcactgtgttggttaggctggtttcaaactattgaccttgtaattcacctgcctaggcctcccaaattgctgggattacaagtgtgagccactgaacccagcctgttgtattcattttcactctacctatctgggggtttggcaatcatctcatgtctcttcatagtcaaaggttttttttccttgacaacaatacctgtttattaaaaataaataccatgaatcttgctcatattcttcaattagaagctagtaatgtgctaagcagagaggatgtaataaaatagtctagtaaattaataccaaaatactaattcataatagaaatttctaaatatttagaaaatactttcactttttaggtttcttaattttactacctggtactactgaatcaaaaattggtggtggcaattagattttcaggtgggggcaacaatatttcatgccagtaaattttggaattgccactaatttagagtgaagaatacactcaactgaggaatgtggaaagtttggattaagatgaaacatcttgaagaaattatcttctaaatgaaagaatcctgaagattttctggaaaaggggcatctgaaacacttttatgcaaagaataaagtacccagaaacattccacaaaaaagggaaataaaacttttagggtatattatgaattatgtattaaagttatactcacaaaggaagaccaagtttctgtagttctgaaacttcacatccctatataaattccgctgtgcagtgtccaggcaatgccactcctccagagagaattctatggccacgtctctaaactgcaatggtccctggaaaacacacacacacacatttttaccaagtggccataggtggaatttttaatttgacttaaggtgaaatgaaagataaaagacaaatggttctgacttataagactcactaaaattatccaataaaataattttcatcacagaaatattatttaatgtattctctaactctgagaaaaaacagcagcataagatacacaacatcagttcatatgtgatatttttctagataataaagtataaaattaaaggcataaacgtacatttttgagtgctatttcatcatatgaaatgagttgtgaatatttttcaaaaggaaaagatgagttagaaggcacctcaaattttaatatatacaataagctgaagaccttctcatgcaggtttttttaatatttttccgcagaagagctggaataaagtctgatttatttatttatttttagttttttggagatggagtttcatgcttgttgcccaggctggagtgcaatggtgcaatcttggttaactgcaacctccacctcccagattcaagcaattgtcttgcatcaacctcctgagtagctgggattgcaggaatgtgccaccatgcctggctaattttttttttttttttttgtatttttagtagagatggggtttttccatgtttgtcaggctggtctcaaactcctgacctcaggtgatctgcccacctcggcctcccaaagtgctgggaatataggcatgggccaccacacctggccaattttttgaatttctaacaggctcatcagtaatgccaatgtttttggctcaagaaggatatgttgtcaaacatccaggaagtggaagtgtcggtgtttttcccactttttctagcctgtaaacaaagataagagtcttcattttccaaagaaaaatatgtagaaaaaaataagaaaaaagggcagctgccagattgaatgtgatggtttatgcacgccagcggcataaacatacctaataatacagcgaaaaataattatagtgaaaaatcagaaagctatttcaccaatcgaatcattaactattaactgcactaggacaaatttttattgtgtgctaatgcacccagaagaacacagcatcactcttgaaatattcctccccaaaaaagtaaattatagtctgaatttatgcaaacttcaaaacacagataatgcctatgttctgtaatttttagtagtaattttaagtaggcttcatttaacaccctagagagcaggtatctcctaataatttttttcagaactttctgggtaataaatgccatcccatttaaataagcattttttttttttttttgagacagagtttcgctcttgtcacccaggctggagtgcaatgatgcaatctcagctcactgcaacctccacctcctgggttcaagcgattctcctgcctcagcctctcaagtagctgggattacaggcatgcgccacaatgaccggctatgtttttgttttgttttgtttttttgtatttttagtagagatggggtttcaccatgttggtccggctggtctcgaactcctgacctcaggtgacccacctgcctcagcctcccaaagtgctaggactacaggtgtgagccactgcatccagcctaaataagcattttcttaatcctgttctgcatagagctaatttaacacagagatggaccctaaacattacatgtccaccatctttactaaggaccacagttttccccaatagaaatcttgagtatccacaaagggaacatttttaatgttatgggtcataaattcttgctgagaattttgcatggcatataagaagctatcacgttgagaatgtagagaaggctctgggatataggaaagaaacatttttcagagacccttgactatcataattttaacaagtagttaaaccaaactcattagggagcaaaaacacaagcagagaaggaaaggtttgtgagtagtaaattcatggcagtccaggaggcagagtggacacagttcttcatctgacacctgtttacttaaagaaaagccatttttttttctttctcatttttctctggaattttttctgagatgagattctctgaacaaattacacccccagcttgagaatatgcctttaaaagtgtcagtgccacatgtttacctgctagcatgacatcaactggcagaaaaacaaagacagaaaaagtccacccatttctgtcctttaaaacaatgagactcagaaacaatgagctgctccatgaaaataaaaatgtatctcttttgctgtcctcaggtgccctcccctgccacagacaccagtaatttctgctacagtaatggaaatatgcaccacactgacctgtccctaccaaattcaaacagaacaggccctgtgaccaccctttagtgcaaaggtggaacttaactctcatgaatgtgttttgaagcaatcatacttgattctggtctcaccttagagccatatgaggcccttcgttaaaacaacatggatgcttccacccagaacaataaacaagctgtggagagggcataagagatttctgcaaattagccatgtgatcctaatgagaagcctgggctgataatcactaagttaatcattgcctctcaagctttaacgagcttctaaatcacttggtaattttggccccactttatgtaaagtgattctggaagcttgaaaagggtccaggaatggttgttttatacaagtcccctgtgaatgctgatgttgctcccccgggctcattattagcattagtcagagaagcaggcacagctcagggtcccttacccttagcacttttgtcacaaccaaatgcttctggcacaaataaggacaacccatctccatcctaaagttttatattatttgctggctctttaaagtttacagatgaaacagagacctggaatctacacttcaattagcagcaattacaaaaggatttgtaaagacaacaagagagggacagagagtgggctgatacaaagttgtctgttagaaatttttatttatttaaacaaataactttgattattgattagatatatatcattatggtttagggtatgaaatataatgtccaatatggcattattattttaatttataactacttgtggcaatagcaaacattttcaagaaatgaataaatagttcaaagtgggagaaagacataactgcactttcactttaatgtctctctgagtttgataaccagaaagacttgcatttttcagataaaagttttttatttcccaaatctcaagacctggattcaaaatttggagctacagatttagggcctgaatggctggagttgcagcaggtgttaactgcacatttgtgggcattttggcaagaggaggaatgggaaagtggagattctcatgtctatatgtctaatcaatgcacagatgctactgtgattgggtttctgggctccatagtcactgaattgctttcaggtttgaagataaaagagtcattgaaaaaggtgaaatgactgattgctgcccgtgaagtttgtagaaatttggtctagcttctctagaaatgactgtagaggactacagataacaaataggctgagacacaattctgcctgcatatttaagggacagcatgcactgtgctgtgcacgtgtctgttaactggaagcctgagagaaaaagtcccctctagagtaaattctggttggcaccttatgtgtttatatcatgtctggtaattctagacagtgtttggaaacaataattaaaagaaaatttttctccagtcccagagaaactccacaataatagaacagaaagaaaatgcttttattacacaattaaacttgaatgtgatgtccatatactcaatctgcttaagagactgcaaagacagaaagatggtcaccataattagttcacaagtagaagaatttgcagcaccatgtcatacatcgttcatcctaaattcacctggagattgaagaggccatctgtgtatactaattgcttatattcaatgatgataaacttttcacatcctcataacaggaggtagtttagtagcttgaagccaggtgtctgctgaagctaggctttcactctgctacaaaaatggttgaatagtgttctatctttttggctatttacattttagagctgtggctctgtactccctggcactgggctacagcactcctgctcactttctcctggttgctactgtcttctcttgacttctaccatctgccactgaggcacagcccagagcacagctcacattttatgtgaatcccatttgccacagcagcactatagtgtcacatcagagagggaagcctgagctgcaggaggagagcctgcaggcctcctgggtagaattacaccttcacaataatcaaaataagaccagtgtttcagtctcaggttctacttataatggtgacaaggaaataatgctgctaaatttccagcatgagtccaaatagagatagctccaaaagttctttctgtgacagcccacctcattgagacaccatggaatactaatagggcttctgaaacagacaaagcattggagagaaaaacagatctccatctgggcaagatgattttgacagaagttaaaacgatcttaagaaaaagctcaggctgtctctgtctctccctctccctctccctctccctcctttccacggtctccctctgatgccgagccgaagctggactgtactgctgccatatctgctcactgcaacctccctgcctgattctcctgcctcagcctgccgagtgcctgcgattgcaggtgcgcaccgccacgcctgactggttttcgtacttttttggtggagacggggtttcactgtgttggccgggctggtctccagctcctaaccgcgagtgatccgccagcctgggcctcccaaggtgccgggattgcagacggagtctggttcactcagtgctcaatggtgcctagactagagtgcagtggtgtgatctcggctcgctacaacctccacctcccagccgcctgccttggcctcccaaagtgccgagattgcagcctctgcccggccgccaccccatctgggaagtgaggagcgtctctgcctggccgcccatcgtctgggatgtgaggagcccctctgcctggctgcccagtctggaaagtgaggaggtctcttcccggccgccatcccatctaggaagtgaggagcgtctctgcccggccgcccatcatctgagatgtgcgagcgcctctgccccgccgccccgtctgagaagtgaggagcccctccgcccggcagccgccccgtctgggaagtgaggagcgtctccgcccagcagccaccccatccaggagggaggtgggggtcagcccccgcccggccagccgccccgtccgggaggtgaggggcgcctctgcccggccgcccctactgggaagtgaggagcccctctgcccggccaccaccccgtctgggaggtgtacccaacagctcattgagaacgggccaggatgacaatggcggttttgtggaatagaaaggggggaaaggtggggaaaagattgagaaatcggatggttgccgtgtctgtgtagaaagaagtagacatgggagacttttcattttgttctgtactaagaaaaattcttctgccttgggattctgttgatctgtgaccttacccccaaccctgtgctctctgaaacatgtgctgtgtccactcagggttaaatggattaagggcggtgcaagatgtgctttgttaaacagatgcttgaaggcagcatgctcgttaagagtcatcaccactccctaatctcaagtacccagggacacaaacactgcggaaggccgcagggtcctctgcctaggaaaaccagagacctttgttcacttgtttatctgctgaccttccctccactgttgtcctatgaccctgccaaatccccctctgcgagaaacacccaagaatgatcaattaaaaaaaaaaaagaaaaaagaaaaaagaaaaaatacaccctggcagaaaacttctcgaatgtaagtaaagtgggagttttcaacttgcccacctccttacaaaaacatgcaataagaatgtgctagatataaagcttacaaatgtgagaaatacgggaagtttttcaattttaacaaatactttcaaagtcatgtgaaaattctcactagaaagaaatccaataaaggcaagttgaggcattaaaaaaaaaaaaagaaaaagctcagaatacatataagattgactaagtcagccagaaaataatcccctaaaagaaatttctctctaaacacccaatgtgcacagctactctcagcatgagaaacatgagctttatgaagaaaggtggcagattttcagaagaattttataaaagtttcttttccatctctgctgctgtctcatctcctagccattgaatgggggttctatattgaaatacatctgacaacttccaacaacactttttgatcaagaaatagaatttgactatgttcgtatagtggaatatattagaacttgtaacatagctaactgaatagctattatggtgtttgggtggccacatcacctgtctttatttgtccggtaatagcagcattccaatttaaagaaataaaagataccaaaattgtgtttacttttaattattcctattgaataaagtaataagcatgtcagactgatatctatcataacaataaattttgtttggatattatattagatataaatatttaagtatgaatacttttaatgaactagtcataatgtatgtagcatttttaaaaattgtaactatacttcagttaaaacactttatatttcaaaagcataaataacaatattaaaataacaatttaggtgattcattcaaagtaagtattggggctttatgttcatactattgtagaaaatactgcttatggctgatgcctgtaatcccagcacattgggaggctgaggtgggtagatcacctgaggtcaggagttcctgatcccatctttactaaaaatacaaaacttacccagggtggttgtgcacacttgtaatcccagctacttgggaggctgaggcaggagaattgcttgaacaagggaggaaatggttgcagtgagccgtgatcatgccactgaaccccagcctgggcaagagagtgagactgtctcaaaaaaaaaaaaactgtttaatttttatgaatgcaggttttctgcaaacactacacataactatgctaattgttctgaagtaataaatagaaagcaaggcacaactacagactccactgttcagtttatgcactgaactgttcttgcttttgcagtgtaagtatttctgcctgcaaatactggataattaccttggatcatcagatttctatcaaaggaatttagtatcttttagtctttatcattttgtattgctaaatttatctgtgtgttaagcttctatgtgctcttaaaatgaggttttatctaaacaaacctgtgtctactttaaaagactaaacatgaaaaaactaaacttttcagaaccaaaaacaaagcaataaatctgaagtactagatagtctggagtgagatttatttagcttttttttttttttgagatggagtctcgctctgtcaccgaggctggagtgcagtggcacgaactcggctcactgcaaaagctctgcctcccagcttcatgccattctcctacctcagcctcccaagtagctgggattacaggcaactgccaccacgcccagctaatttttttgtatttttagtagagacggggtttcaccgtgttagccaggatggtcttgatctcctgacctcgtgatctgcctgcctcggcctcccaaagtgctgggattacaggcatgcaaaaccgcgccctgcccttatttagctcttaatatgatttacatatatttcaaaaaagcagagaaaaatatctacatataatctaaatcccttaagaaaagagagaatagcaaaaaaatttttggaactttttaaagagttttgaactcttggacatctgaattttgcacactatatgcacttgaaagaatgttaatggggaaaaagcagaagagaaaaagacgttataaaaaaatccatgagtgcacaacacctatgaaacagaatagagagcccagaaataatgcctttcacctgcaaccatcagatttctgacaaagctgacaagaggaatgtgggaagaattctctctttcataaatggtgctggaataactatctaccactatgtagaagactgaagtggaccccttcattacaccatataaaaaaatcaactgaagataaattaaggacttaaatgtaaaacttaaaattataagaaaccctgcaagataacctaggaaatagcattctagacacagaaacaggtaaagacttcatgatgaagctaccaaaagcaactgcaacagaagcaaattgacaaatgggatgtatttaaacttaagagcttcttcacagcaaaggaaactatcaacagagtaaacagacaaactagagaataaaagaatatatttgtaaattttgcctctgaaaaaggtctaatatacagaatttattaggaacttaaacaagtttacaagaaaaaaacacactcattaaaaagtatgcaaaaaacatgaacagatgcctttcaatagaagatacacatagggctaacaagcatatgaaaaaaaaatgctcattgctaatcattagagaaattagaagagaaaccacaggctgggtgcggtggctcacgcctgtaatcccagcactttgggaggccaaggcaggcagattacaaggtcaggagatcaagatcatcctggctaacatggtgaaaccctgtctctactaaaaatacaaaaatcagccaggtgtggcagtgtgcacctgtagtcccagctactcaggaggctgaggcaggagaattgcttgaatctggtaggcagaggttgcagtgagctgagatcacaccactgcactcctgcctgggcaacagagcaagactccgtctcaaacacacacacacagacacacacacacacacacacacacacacacacacgcagagaaaccacaatgagataccacctcataccagtcagaatggctatttttaaaaagtcaaaagataacagatgctgacaaagttgcagagaaaagggaatgcttatactcctctggtgggagtgtaaattatttcaacaactgtaaaaatcagtgtgacaattcctcacagaatgaaaaacagaattatcattcgactgggaaacctcataattgagtatatacccaaagaaatatgaaatattataaagacacatccacatgcatgttcactgcagcactattcacaatagcaaagacacggacagactaaatgcctatcaatggcagactggatcaagaaaatatggtatggtcagatgcggtggctcatgcctgtaattccagccgtttgggaggctgaggcaggtggattgcctgagcttagaagtttgagaccactctgggcaacatggcaaaattttgtctccacagaagatacaaaaaaaaaaaaaaaaaaatggccaggcttggtaacacccgcatgtagtcccagctacttgggaggatgaggtaggagagaattgtttgagcctgggaagttgaggataaggtaagccaatatcacaccacagcactctagcctgggcaataagtgagaccctgactccaaaaacaaaagatttagtaaaaacaaaatatggtacataagcatcctggactactctgtggccattaaaaacaaataaccatgtcctttgcagtaacattgatgaagctggagaccattattcttacaaaacaaatgcagaggctgggtgtagtggctcatgtctgtaatcccaacactttgggaaaccaaggtgagtggatcacctgaagtcaggagtttgagaccagcctaaccaacatggagaaatcccatctatactaaaaatacaaaattagcagagcatggagacgcgtgcctgtaatcccagctactcaggaggctgaggcaggagaatggcttgaacctgggaggcagaggtgagctgagaacacaccattgcattccagcttgggcaacaagagcaaaaacaaacaagcaaaaatatctcaaaaacaaagaaacaaaacaaaaaaagaaaataatacaggaacagaaaatcaaatgcatgtcattatttataagtaagagctaaataataagaacacatgaacacaaagaggagaaaaacaggcactgaggcctagtagagggtggagggtgagaggagtaagaggatcagaaaacatacctgtttggtgctatgggtagtacctcagtgacaaaataatctgcataccaaatccccatgacataatttcagctgtataacaaacccacatgtgtacatcgaaccaaaaataaaagctaaaagaaaaaaaactccccgagtgggagagagtgcaatgtaggtgaaagaacttatttttgctacagataatggcccaggtagggctgtactctgatttacttctgtgtgaatacaggcagatgagattatgaacaagtggtccagaccctaggatggtggagaaaacaggttgctgctgcagattcagtgtctgggggtggggttatgccaggagacttgtagatactgtgggtccttttcaagaaacactgggttcaaaaatgccgtggtgaagttcctgagggtggtgccgagtcctaggaggagtgtggacatgtcaatgtctagtgtgtgtgtttgtgagtgggtgggaatactatggtggcacctgtgggaaaagggcgtctgtcatgggagtttctctccgctaagttttcagtccacagttgccctcggagaagacctggaatcacaggacaatgggcagtgtgacagcctgtgtacaggagagcagagcctcccattcccagacacccagagttttattccaggccaggcctccatgatatctttttttctggcaccaaatctgtagcatttgctgaacatcaaacaattctccaacaccaacttacggtctaacatttgaattctgacaccacccacagtcagtacagaccctgattcagggctcggtcccacaacattgtcctcaatgcagatgccagtcataaaccccatgggcccatgtatgtgtctgagctactgtttaaaaacgggagacggccgggcgcggtggctcacgcctgtaatcccagcactttgggaggccgagacgggcggatcacgaggtcaggagatcgagaccatcctggctaacacggtgaaaccccgtctctactaaaaatacaaaaattagccgggcatggtggcgcgcgcctgtagtcccagctacacgggaggctgaggcaggagaatggcgtgaacccgggaggcggagcttgcagtgagtcgagatcgcgccactgcactccagcctgggcgacagagcgaaactccgtctcaaaaaaaaaaaaaataaaaataaaaaaaaataaaaataaaaacgggagactcccataacgtccctgaagttcaataatttcatagagctactcacagaactcagcaggaaactgtagttacctttaccggtttaatatataagatgaaggccaggaaaagtcaaatggaaaaaatgcacagaacaaataaaagagatggaaaaagatgaaacacataatcctaaaaaatatttgtgattaataaaatcatcctaggtcgggcgcggtggctcacgcttgtaatcccagcactttggggggccgaggcgggcggatcacaaggtcaggagattgagaccatcctggctaacacggtgaaaccctgtctctactaaaaatacaaaaaattagcggggcatggtggcaagcgcctgtagtcccagctactcaagaggctgaggcaggagaatggcttgaacccaggaggcggagcttgcagtgagccgagatggtgccactgcactccagcctgggcgacagagcgagactctgtctcaaaaaaataaataaataaataaataaataatttaaaatgtctccatcctttgtgtgctccaggaacagtttatggaaggaaacacccttcccattatgacttaagtggtgctctcttttctttcctaaaacacaggctgacacacacactgcacattttctccttttttttttttgagatggagtctctctctgtcgctgaggctggagtgcagtggcgcgatctcggttttctgcaagcgctgcctcccaggttcacgccgttctcctgcctcagcctccggagtagctgggactacaggcgcccaacaccacacccagctaacttttttttttttttgtatttttagtgaagacggggtttcaccctgttagccaggatggtctcgatctcctgacctcgtgatccgcccgcctcggcctcccaaagtgcggggattacaggcgtgagccaccgcgccgagcctggaattcatttttttttttaaacataaatctaatgtttttattttacaaagtttagaaattgcctcaaaacaataaaaacttcatcatcagtaagacctccccagtttcctttcatcttaaccttaactgcatctgcctgtgggatcccagctttccagggctctgtagcttctctcaggataaaggcttcttctatggctggggtgagcaggctgagacagctgcatgggtggctcctcagaaagaactaactgggcctttaataacttcctcttgcatgcttaatattagccctagcttggagttactaggttcaagctttaatttccatgtcagagttattcacttggttttcaaaactaagtgtttgaaaaatccagtgaaattactcacagcgtttacataagaaaaggaaattttaaggtgcttacttttttttttttttttttgagatggaatctcgctctgtcacccacactggaatgcaatggctggatctcagctcactgcaacctccacctcctgggtaaaagctattcttctgcctcaccctcccaagtaggtgggactacaggcatgctccaccacacccagctaatttttgtatttttagtagagacagggtttcaccatgttgggcaggcgggtctcaaactcctgacctcaaggaatcaacccgcattggcctcccaatgtgctggaattacaggcgtgagctactgcacctggctaaggtgcttgcattttatgcctccataagaaaaacaaatatatctacttctttcagacaatatatgtattattttattatttatattaaaaaataatgtagtaaaaaattagtcatatgggaatgcttctaaaagttaccacgtttcatcacatgcaatttagcactaaactcagaaatcaagacaacaggatatagaatggagatattcactgtcacaaatttaccctgcaaaaagaggaactgatgttttgatgaatctgtgtaactcattcaccacattttcctatgaaaatatattcattgtctagagccaaaatggaagagagattttccctattttttcccttggtagctagcattataaagctaaggcttagaattctgtctgaaatcactaagacataaaaaccacacccaagaaaattcctaaactcactcttggaaagaaaaatgtaaatgagttattaacaaatggaatatatgattaaatattaattttttgaaactcatcttttattttctttgtaaatattttcttacctttcaagccctactaataaaatgcaaattacagataaaaaactgattcaggtgggtgctgtggctcactttaatgccagcactttgggaggccaaggcaggcagatcaattaagattaaaagtttgagtggggcacggtggctcatgcctgtaatcctagcactttgggaggcctaggtgggcggatcacctgaggttgggagttcgaggccagcctgaccaacatggagaaaccccatatctactgaaaatataaaaattagctgggcatggtggcacatgcccaaggctgaggcaggagaatctgggaggctgaacctgggaggcagaggttgtggtgagccaagatcacgtcatcgcactccagcctgggcaacaagagcaaaaatccatctcaaaaaaaaaaaaaaaatgactaaaagtttgggaccagcctggtccatctctactaaaaatacaaaaactagccaaatacagtggtgcacacgtgtagtcctagctactccggaggctgaggcatgagaatcacttgaacccagaaggtagaggttgcagtgtgccaagatcaagtcactgcattccaacctgtgcaacagagtcagactgtcttaaaaaaaaaaaaaaaaaggcagaatcaacaacaacaacaaaaacacctgaggtcaaaataagtgaacaaatctttcaaggtagatatccaatcactcaccccatcctgttcacatgctcaataaccaccctcccaggagacacagcgcagacacagcgtgactgccccagctgcattttactatgtaagtttttaccccatctcactggggtcattttcttttgtcttttgaaggtttttttcacaaactttttactatttttctttcactccccccaagagcatccagggggcagaaattatttgttttcccctcaataccagcatctgattggctcaccaacaatgtgtctccaagaaatggaagttaggttgggtcaagacaatcttcatgtctcaaggggctagcttttcaaaaaaaaaaaaaaaagtatatcaggagatgcctttcagccccaaggctgccacctgctcccttgagaggctacactctatacttcaggtggtcctaagggagaaagtgacccaagagctaatatccattagacattttagcagacatagccatagtgggtatcttggtttatctccagaaagtactaaaacccaggcccagaataaaactgaaggttagcagaggtcacatcaccctataatgtttccagagggtaatgttaacctaaaaacattctggtaagttctctggaaaaataaaagaaaaaaaggtacagatattttttacaatacagtgtcaggggattattctttgctttcttctcatgggaaatatttaaaaatagaaaacaaatcttttcaatagtgctatgcaatgctttaaacaatgattgaggaacgtggggtacaggaggccctgctggggacacatgtgaaaaatgccagagaaaatcagccccttgtgggttgtgaaaataattaagcggcaggcaattagactgagaaggctctagtcctcagattcctacttgtaaaaaaatgtaaactcaagttgatttgttaataaattactacatttggggaaacaaatttcaggcttaaacaactataaactgccaaataagctctgattacataaccaggaaatttccaccttgattatacaaattaagaagctacgtaagtacacctaaccaattgttgaatttggttttcttcatcactgattttacaaatgtctttccttcaagcccctcccatggaccacagactacaaactataactgggtgctctacaattcttgaatcactctttgattaaattacttgattttttgcagtgactcccataattttttttttttttgtaaaggacatatcatatttattcatacacatgctggaattattggtgcagacatttaaatacattttctttgagaaagtccttttttttttttttttggatggagtttccctcttgttgcccaggctggagtgcaatggtgcaatctcagctcacaacaacctctgcctcctgggttcaagcaattctcctgcctcagcctcccaagtagctgggattacaggcatgcaccaccacgcccagctaattttttttatttttagtagagacggggtttctccgtgttggtcaggctggtcttgaactcctgatctcaggtgatctgcccgccttggcctgccacagtgctgggattacagtcgtgagccaccacagctggcctgggaaactccattctttttttttttttttttttttaaatttatttttttattgataattcttgggtgtttctcacagagggggatttggcagggtcatgggacaatagtggagggaaggtcagcagataaacaagtgaacaaaggtctctggttttcctaggcagaggaccctgcggccttccgcagtgtttgtgtccctgggtacttgagattagggagtggtgatgactcttaacgagcatgctgccttcaagcatctgtttaacaaagcacatcttgcaccgcccttaatccatttaaccctgagtggacacagcacatgtttcagagagcacagggttgggggtaaggtcacagatcaacaggatcccaaggcagaggaatttttcttagtgcagaacaaaattaaaagtctcccatgtctacttctttctacacagacacggcaaccatccgatttctcaatcttttccccacctttcccgcctttctattccacaaagccgccattgtcatcctggcccgttctcaatgagctgttgggtacacctcccagacggggtggtggccgggcagaggggctcctcacttcccagtaggggcggccgggcagaggcgcccctcacctcccggacggggcggctggccgggcaggggggctgaccccccccacctccctcccggacggggcggctggccgggcggggggctgaccccccaacctccctcccggacggggcggctggccgggcggggggctgacccccccacctccctcccggacgggcggctggccgggcagaggcgcccctcacctcccggacggggcggctggccgggcggggggccgacccccccacctccctcccggacggggcggctggccgggcagaggggctcctcacttcccagtaggggcggccgggcagaggcgcccctcacctcccagacggggcggctggccgggcggagggctgatccccccacctccctcccggacagggcggctggccgggcggggggctgacccccccacctccctcccggacggggcggctggccgggcagaggggctcctcacttcccagtaggggcggctgggcagaggcgcccctcacctcccagacgggacggctggccgggcggagggctgacccccccacctccctcccggacggggcggctggccaggcggggggctgacccccctacctccctaccggacggggcggctggccgggtgggggggctgacccccccacctccctcccggatggcacggctggccaggcggggggctgacccccccacctccctcccggatggcacggctggccgggcgtgggggctgaccccccacctccctcccggatggggcggctggccgggcggggggctgacccccccccccccacctccttcccggacggggtggctgccgggcggagacgctcctcacttcccagatggggtggctgccgggcggagaggctcctcacttctcagacggggcagctgccgggcggaggggctcctcacttctcagacggggtggttgccaggcagagggtctcctcacttctcagacggggcggccgggcagagacgctcctcacctcccagacggggtctcggccgggcagaggcgctcctcacatcccagatggggcggcggggcagaggcgctccccacatctcagacgatgggcggccgggcagagacgctcctcacttcctagatgtgatggcggctgggaagaggcgctcctcacttcctagatgggatggcggccgggcgtagacgctcctcactttccagactgggcagccaggcagaggggctcctcacatcccagacgatgggcggccaggcagagacactcctcacttcccagacggggtggcagccgggcagaggctgcaatctcggcactttgggaggccaaggcaggcagctgctccttgccctcgggccccgcggggcccgtccgctcctccagccgctgcctcccgggcggcgctcgccggcgccgactcccataatttactttttctagacagagtctttctctgtcgcccaggctggagggaagtggcatgacctcagctcactgaaacctactccttccgggttcaagcgattctcacctctgcctttggagtagctgggactacagacattcaccatcacacccagccaatttatgtatttttagtagagatggggtttccccattttggccaggcttatcttgaactcctgacctcaagtgatccacccgcctcggcctcccaaagtgctgggattacagacgtgagccaccgcgccaggccccataaattttttcttttccttctttcttttttttttgagacagagtctcgctctgttgccaggctggaatgcagtagcacgatcttgtcttactgcaacttccgcctcccaggttcaagcgaattctcctgcctcagcctcctaggtagctgggactacaggcccccgccgctatgtttggctaatttttgtgttttagtagagacagggtttcaccatgttggccaggatggtctcgatctcttgactttgtgatccacccgcctcggcctcccaaagtgctaggattacaggcatgagccaccacacctggccacccgtccccataaatttttaataagagaaaacagaaactgtgaaccccacagaccaaagctcttcccattcatgaacccacaccccgagtcagggttcccccccaaagatcctcctggagtccccgcacaatctaggagagacgtggcactgtgggtgcagggctgccctgagaaggtttcaggccagggcacagtcaccgcgcagggaagagacaggacacccctggaccgcctgtcagcgcagctgccatcttagggctgaaggggactgaggccgagctgggcaaggagaacttgtggcacagattgtggagctgactgaggagaggcctgagtcctgccactgccacttgtcaccggttccaaccatcccctcccgctcactcaggatgtcggaccggcactctcactgtttctaggcttccaggaggtcctggtgtcttagctgtggatctcccaatacctgcaggtcacagggctatagaggttgcgcctctaggagcagaggacacagactagtgaagaggagacccagagctcaggctgcagccagagacaaaggctgcagccaaacactgaagacgtcctgttcactccagctgcgtgcctgattgggcagttttcaggccagcgtttcttttttcttttttttttttattgatcattcttgggtgtttctcgcaaagggggatttggcagggtcataggacaatagtggagggaaggtcagcagataaacaagtgaacaaaggtctctggttttcctaggcagaggaccctgcggccttccgcagtgtttgtgtccctgggtacttgagattagggagtggtgatgactcttaacgagcatgctgccttcaagcatctgtttaacaaagcacatcttgcaccgcccttaatccatttaaccctgagtggacacagcacatgtttcagagagcacagggttgggggtaaggtcataggtcaacaggatcccaaggcagaagaatttttcttagtacagaacaaaatgaagtctcccatgtctacctctttctacacagacacagcaaccatccgatttctcaatcttttccccacctttcccccttttctattccacaaaactgccattgtcatcatggcccgttctcaatgagctgttgggtacacctcccagacggggtggtggccgggcagaggggctcctcacttcccagtaggggcggccgggcagaggcaccccccacctcccggacggggcggctggctgggcggggggctgacccccccacctccctcccggacggggcgtcagcccagcgtttctgattggataatgcttaaggcccccgccccctcaggccctgagtaacagaaaatgtgatcaggactgagtgaagaaaaagtcacagcctaagctgcagcgtttttcaggcagggcttcctccctgagctgagccaggcccaacccagatcatgggaaaattctatctttttttttactctctctctttttgaatatattcaaaaggtgaacagaagtattttgctgtcatattaataatacataaaatttttttcaagagaaaatcagcttttactttggtaatagtgtattatcaatactaaagctaattttaataaaccttataaataaatcaaatttgtcatttttgaccactccggttttacatgtatattttgtaatctcttgtaatttttaaaaactgtttacattttatttttatccaaattctttttattttttcaatttgaaaccacctttaagtaatttcaaattgttataggagatagaaagaagtcatttagggccaggttcactggcaagtgcctgtaatcgcaacactttgggaggccaaggtgggtggatcacttgaggtcaggagttcaagaccagcctggccaacatggtgaaaccccatttctactaaaagtacaaataactagctgggtgtggtgctgcacacctgtagacccagctagtccggaggctgaggcaggagaattgcttaaacccagaaggcggaggttgtgtaactgcccaaggggttcaccttgccctatgtctagacagagctgattcatcaagactgggtaatttgtggaggaaaagttaaatactaaatttgaacttaattgaacgtggacaaactcagtagtcaccaagttctcaaacaggttgtgtgaggcccttgaggcattcattcagcgctgtttcagagaaatctctatttcaatctatttctatatattagttgttgaaaaacaatagacaatcgcaaaaacaagttgacagttttgtgttccttgaccccagttgcaaatggccctcatgactgggccttatgccaaacaactcgttacaaaagagctagggtatcagattgtgctgaagcttcattagaccctcctcatctgtgcaggaatgagtagctgactctggagcccaagctgttgcttcccagtctggtggtgaatcctccatagtctggtgagtgtaaatatatatatctcttttcctttctcctcttcccattgcaatttgcttattatatcaacatgcttattatatcaatctggttattacattgatttgcttattatataatttgctaattatatctgcatttccatttacgtggcacaaagcttatttacccttaaaggtattgtgtgtgtgtcttttcttctccccttgaatgtttcccacacagaatatttttggcgtcacgaacaggattcaaaaaccaaactgtgccactttttggccacaaggacagggctggaaactcgaggaaatcccaaatccagggatgggaactccccaatatcactgtcaattcctacaggattgaacgaaggggacgaatgcagaaatgaagacaaagacaaaagatttgttttaaaagaaggggtcaggcagggcgcagtggctcaggcctgtaatcccagcactttgagaggccgaggtgggtggatcgcgaggtcaggagagcgaaaccatcttggctaacacggtgaaaccccgtctctactaaaaatacaaaaaaatttagccaggtgtggtggcagacacctgtagtcccagctacctgggggggtgggggggtggggctgaggcaggagaatggcatgaacccaggaggcagagcttgcagtaagccaagatcgtgccactgcactccagcctgggtgacagagcgagattcggtctcagaaaaaaaaaaaaaaagaaggtatcaggggctccttgcttctagtgagcagaaggcagccctgtttctacaggccttagtatttattaggtagaatcaatagggagggagaggtaatggttggtcagctgcttgatttatcacaggtacatataattgctttctttgtacaacaggcttcagatattcctatagataaccacaaggaacactgcgcctggggcataactgccctcagcacccgttctggcagcagatgcagtttgtcagttttccaacatcctgctttcatgagaagagttttcccatatagcctctgtcaggcctctgagcccaagccaaatgaaatttggtgccatgactcggctcgggggacctcccttgggagatcaatcccctgtcctcctgttctttgctccgtgagaatgacccacctgtgacctcaggtcctcagaccgaccagcccaagaaacatctcaccaatttcaaatccggtaagcggcctctttttactctcttctccaacctccctcactatccctcaacctctttctcctttcaatcttggcgccacacttcaatctctcccttctcttaatttcaattcctttcattttctggtagagacaaaggagacacgttttatccatggacccaactccggcaccggtcatggactgggaaggcagccttcccttggtgtttaatcattgcagggacacctctctgattatacactcacgtttcaagggtgtcagaccacacagggacacctgccttggtccttcacccttagcggcaagtcccgattttctgaggaagggacaagtacccctcaaccccttctctccttgtctctaccccttctctgcttttctggggcaggggcaagaacccctcaaccctttctccttcacccttagcggcaagtcccgctttcctggggcaggggcaagtacccctcaaccccttctccttcacccttagtggcaagtcctgctttcctagggggcaagaaccccccaatcgcttatttccataccctaacctcttatctctgtgccccaatcccttatttctgcaccctgacctcttatctctgtgccccaatcccttatttctgtgccccaacaccttctctgcttttctggagggcaagaaccctccaccccttctccgtgtctctactcttttctctgggcttgcctccttcactatgggtaagcttccaccttccattcctccttcttctcccttagcctgtgttctcaaaaacttaaaatctcttcaactcacacctgacctaaaacctaaatgccttttcttctgcaatgccacttgaccccaatacaaactcgacagtagttccaaatagccagaaaatggcactttgaattttttcatcctgcaaaatctaaataattcttgtcgtaaaataggcaaatggtctgaggtgcctgatgtccaggcattcttttacacatcaatcccttcctagtctctgtgcccagtgcaactcgtcccaaatcttccttctttctctcccacctatcccctcagtaccaaccccaagcatcactgattctttctaatcttccttttctacagacccatctgacctctctcttcctccccaggctgctcctcaccaggccgagctaggtcccaattcttcctcagcctccgctcctccaccctataatctttttatcacctcccctgtaggggtgggttgcccctccacacctgtgggtgtttctcataaggtggaacaagagacttaggaaagaaaaagacacaaagtatagagaaagaaataaggggacccggggaaccagcgttcagcatatggaggatccccccagcctctgagttcccttagtatttattcatcattcgtgggtgtttctccaagagggggatgtgtcagggtcacaagacaattgtggggagagggtcagccgacaaacacgtgaacaaaggtctttgcatcatagacaaggtaaaggattaagtgctgtgcttttagatatgcatacacataaacatctcaatgctttacaaagcagtattgctgcccgcatgtcccacctccagccctaaggtggtttttccctatctcagtagatggaacatacaatcgggttttataccgagacattccattgcccagggacgggcaggagacagatgccttcctcttgtctcaactgcaagaggcatgccttcctcttatactaatcctcctcagcacagaccctttacgggtgtcggggtgtcgggcggggggacagtcaggtctttcccttcccatgaggccatatttcagactatcacatggggagaaaccttggacaatacctggctttcctaggcagaggtccctgcggccttccgcagtgtttgtgtccctgggtacttgagattagggagtggtgatgactcttaacgagcatgctgccttcaagcatctgtttaacaaagcacatcttgcactgcccttaatccatttaaccctgagtttgacacagcacatgtttcagagagcacggggttgggggtaaggtcacagaatctcaaggcagaagaatttttcttagtacataacaaaatggagtctcccatgtctatttctttctacacagacacagtgacaatctgatctctcttgcttttccccacatcccctcctcacacctggtccggcttacagtttcgttctgtcccccacctgcccagcaatttactcttaaaaaggtggctggagccaaaggcatagtcaaggttaatgctcctttttctttatcccaaatcggatagcgtttaggctctttttcatcaaatataaaaacccagcccagttcatgacttgtttggcagcaaccctgagacactttacagccctagaccctaaaaagtcaaaaggccgtcttattctcaaaatattttattacccaatctgctcccgacattaaataaaactccaaaaattaaattccggccctcaaaccccacaacaggatttaattaacctcgccttgaaggtgtacaataatagaaaaaaattgcaattccttgcctccactgtgagacaaaccccagccacatctccagcacacaagaacttccaaacacctgaaccacagtggccaggcgttcctccagaacctcctcccacaggagcttgctacacgtgccggaaatctggccactgggccaaggaatgcccgctgcccaggattcctcctaagctgcgtcccatctgtgtgggaccccactgaaaatcggactgttcgactcacctggcagccactcccagagcccctggaactctggcccaaggctctctgactgactccttcccagatcttctcagcttagcggctgaagactgacactgcccgaacgcctcggaagccccctagaccatcacggatgctgagcttccggtaactttcacagtggaaggtaaacccatccccttcttaatcaatacagaggctacccactccacattaccttcttttcaagggcctgtttcccttgcctccataactgttgcgggtattgatggccaggcttctaaacctcttaaaactccccaactctggtgccaacttagacaatactcttttaagtactcctttttagttatccccacctgcccagttcccttattaggctgagacactttaactaaattatctgcttccctgcctattcctggactacaactatatctcattgctgcccttcttcccaatccaaagcctcctttgcatcctcctcttgtatccccccaccttaactcacaaatataagatacctctactccctccttggtgaccgatcatgtaccccttaccatctcattaaaacctaatcacccttaccccactcaatgacaatatcccatcccgcagcaggctttaaaaagattaaagcctgttatcactcgcctgctacagcatggccttttaaagcctataaactcttcttacaattcccccattttacctgtcctaaaaccagataagacttacaatttagttcaggatctgcgccttatcaaccaaattgttttgcctatccaccccgtggtgccaaacccatatactctcctatcctcaatacctgcctctacaacccattattctgttctagatctcaaacatgctttctttactattcctttgcacccttaatcccagcctctcttcgctttcacttggactgaccctgacacccatcaagctcagcaaattacctaggctgtactgccgcaaagcttcacagacagcccccattacttcaatcaagcccaaatttcttcctcatctgttacctatctcggcatttctcataaaaacccacatgctctccctgccaatcgtgtccaactgatctctcaaacccaagcaccttctacaaaacaacaactactttccttcctaggtatggttagcatggtcagaattcttacacaagagccaggaccacaacttgtagcctttctgtccaaacaacttgaccttactgttttagcctagccctcatgtctgcgtgcagcagctgctgctgctttaatacttttagaggccctcaaaatcacaaactgtgctcaactctctctctacagttctcataacttccaaaatctattttcttcctcatacctgatgtatatactttctgcttcccggctccttcagctttactcactctttgttgcatctcccacaattaccattgttcctggcccagacttcaatccagcctcccacattattcctggtaccacacctgacccccatgactgtatctctctgatccacctgacattcacatttccccaaacttccttctttcctgttcctcaccctgatcacacttgatttattgatggcggttacaccaggcctaatcgccacacaccagcaaaggcaggtgatgctatagtacaagccactagcttgcctcttagaacctctcatttccttcccattgtggaaatctatcctcaaggaaataacttctcagtgttccatctgctattctactactcctcagggattattcaggccccctcccttccctacacatcaagctcgaggatttgccccacccaggactggcaaattagctttactcaacatgacctgagtcaggtaactaaaacacctcttagtctaggtagacactttcactggataggtacaggcctttcctacagggtctgagaaggccaccacagtcatttcttccattctgttagatataattcctcagtttagccttcccgcctctatacagtctgataacagatgagcctttattagtcaaatcagccaagcagtttttcaggctcttagtattcagtgaaacctttatatcccttatggtcctccatcttcaagaaaagtagaatggactaaaggtcttttaaaaacacacctcaccaagctcagccaccaacttaaaaaggactggacaatacttttaccactttcccttctcagaattcaggcctgtcctcagaatgctacagggtacagcccatttaagctcctgtatagacgctcctttttattaggccccagtctcattccagacaccagaccaacttagactgtgcccccgaaaaacttgtcatccctactatcttctgtctagtcatactcctattcacctttctcaactactcatacatgccctgctcttgtttacactgccagtttacactgtttttccaagccatcacagctgatatctcctggtgctatccccaaactgccactcttaactcttgaagtaaataaataatctttgctggcaggactatgctgaatctccttaggcattctctaatcagatatcctgagtcatcccaattcttagaccttttatacctgtttttctccttctgttattccatttagtttctcaattcatccaaaaccatatccaggccatcaccaatcattctatacgacaaatgtttcttctaacaaccccacaatatcaccccttaccacaagacctcccttcagcttaatctctcccactctaggttcccacgccgccccaatcccgcttgaagcagccctgagaaacatcgcccattctctctccatatcaccccccaaaaattttcaccgccccaacacttcaacaccattttgttttatttttcttattaatataagaaggcaggaatgtcaggcctctgagcccaagccaagccatcgcatcccctgtgacttgcatgtatatgcccagatggcctgaagtaactgaaaaatcacaaaagaagtgaatatgccctgccccaccttaactgatgacattccaccacaaaagaagtgtaaatggcctgtccttgctttaagtgatgacattaccttgtgaaagtcattttcctggctcatcctggctcaaaaagcacccccactgagcaccttgcgacccccactcttgcccgccagagaacaaaccccctttgactggaattttcctttatctacccaaatcctataaaacggccccacccttatctcccttcactgactctcttttcagactcagcccacctgcacccaggtgaaataaacagccatgttgctcacacaaagcctgtttggtggtctcttcacacggatgtgcatgaaagcctccagtggtatactgagttggtcaggacccccattttctctgcgtccaacatccccagttctcctctttggtgattgagtggttcagggaaactggcctttgtaagaactgagaatctaaattaatgcaatttaaacctttgactgtgtatgtgagaggagagaaagaccctctcacattgttttatattgttttatattcagtaaaaacaacaaggaagtaaaaccaaagacaggcagcctggcgccaggcctgaaaccaggcctgggcccacctggcctaaacccagtagttaaaaatcaacttatgatttagaagctgatgttattcatagattccttacattgtatagaagaacacggtgaaactccctgccctgttctgttcctccctgaccaccggtgcatgcagcccctgtcatgtaccccttgcttgctcacatcaatcacgaccctttcatgtgaaatctttagtgttgtgagcccttaaaagggcagaaattgtgcactcagggagctcagattttgagacagtagctggccgatgctcccagctgaataaagcccttccttctacaactcggtgtctgagagattttgtctgcggctcatcctgctacatgtgaagtgcagcaggggattccagtcagcaaaggagatgctgaaggatctccccgagtgaatggtgtttgcttactctttataagttaatgtatcaggataggggatagttgctacaagagaaataagagctggaaaagaaaaatgccaatccaactgccagactgaccctggcccaatgccaggcctatgtcttaactgttcagactcaaagatatcagcctattgatgaaaaaagtggctgtcccaatggccccatcagggtaaaattgaagaactagtcagtcaggtcttggagcaggtaaaaacacagctcctatctcaaggatgggaaattaaccttagtaaaattcaaggacaaattgtaaaattccttggcatcctgcacaaactataaaattccttggcatcctatgaaatgcagggaaatagtccattttaccaaagactaaggctaaaatactaaaaattgcaacccttaccactaaaaaggaggactagaaatttattggcttgtttggattcgggagacattatattcaccacttgggtaacattttacaacctctgcatgcagtcactagaaaatgctgtgactttcactggggagagaaagagagcatggcttttgaacaagctaaacaagcagtgcaactggccctggacctatggcccatatgagatgggccagtagaactgcaaataactgtcctaaatcaacatgctaattggagccttaggcagaaacaagatgggaagagggtacactttgggttttgaacccagaaattgccagaggccagcaaagcttatacccctttcaagaagcaattgttaccttgctattgggctttgctggaaatggaacacctctgcttcaaccgtgatgtctttataaggtctgaaattcctattatgacttgagtcatgagttcccccaaaactcaccaaatagggcatgcccaagaaagtaacatcataaaatggaaatacaacatagaagaccaggctaagccaaaaccaaagggggtatcatttttacatgaggatgtacaaaacttgccagctcaggaaaccactgaggaagtgctgcacatagggaaggaaaccgcccctccccccactcaatggtgcagttcctttaaagaactaagcccagaggatcagaaacatgcttggtttactgatcgatccagcaaacatattggtgggacccaatgctggaagggcatggcttataatcctgttaaaaacgtaagcatttctgatgaaggaaggggtgggagcagccagttagctgaactagtagccaacctccaagatattcaggaggaagccagagggatttgtcacttgtataccaactcttggtcagtagcaaatggtcttactacctggatgctccaatagtgacaaaacaaatggttaattgggaataaagaggtttggggaaaaaaatactgagaagatatctgaatcctggtgcacactaccattgttgctgttttccatgttgatgctcatccatctctgctttctcttgacagactatttaatcaccaggaagatcaacaggccaaaatttttattataactgcaaacttgaatgcggatgaattgatttcctgttcaagccttgcaatgactggcattataatgtgtggtggtataattgatagtgattagtggcctaaatattccacttaaaagatacagaatggtagaatggagaagagtttaccaaccaaatatctgcggtctttaagagactcacccaacacataaaaactcacataaagttaaggtaaagggttgggaaaagatagtcatgcaaatgtaccccaaaagcaagcagtagtagccattcttacatcagacaaaacagacattaaagcaaaaacagttaaaaataaaaaaagacaaagagggacattatataatgataaaaggactagtccaacaggaaaatatcacaattctaaatatatatgcacctaacactggagctcccagtttattaaacaattactactagacctaagaaatgagataaatggcaacacaataataatggggaacttcaatactctactgacagcactagacaagtcatcatgacagaaagtcaacaacaacaacaacaacaaaaacaatggacttaaactataccgtagaacaaatggacttgacaaatatttacagaacattccacacaacaactgcagaatatacatttcattcatcagcatatgaatcattccctaagacagacatatgatgggccacaaaacaagtctcgataaatttaagacaatcaaaattatatcaactactctgtcagactacagtggaataaaagtgaaaactccaagtgaaccctcaaaaccatgcaaatccatggaaattaaataaatacatggaaattaaataaaaataaaatttaggatcaacttgtttctgaatgattgttgtatgaaatcaagatggaaatttaaaaattctttgagctgaacgataataatgacaatctattaaaatgtctgggatacagcaaaagtcgtgctaaaaggaaagttcatagcatcaagtgcctactaaaaagtctgaaagctcataagtagacaatctaagataacacctcaaggaactagagaaacaagaacaagccaaacccaaacccagtagaaaaaaagaaataacaaagatcagagcagaaccctagggggaggggtggctgcagtctctgtggaccagcagacttagcctttcctcctgctagttttgaagaatttgagcagcccagatgagtggattttcccccagtgaaacacccccctccaccaaaggacagtcaaagtgcttcattaaatgagttctgcttcctgtgccacccaactggatgagacccttcaacagggattgtcagacaccctatagaggagcaattctactggcatcaggtttgtgcctcttgaggtcagagatcccagaggaaggagcgggcactcttctttgctgttctccaacttccttgagtgacatctccaggcacggcggtgaaccagatgaataggtcctgaagttagcccctagcaaactgcagcagcgctacagaagatggacctgaccattgaaagaaaaacaaacagaaagcaacaatgcatcaacaagaaaaaaatgtacccacaaaaacctcatccaaagccacacatggtggctcacacctgtaacccaatactttgggaggccgaggcagtgggcagagcacttgaggtcacgagttcgagactagcctggccaacatggtgaaaccttgtctctactaaaaaatacaaaaaaaaatagccaggcgtggtggtgcatgcctgtagtcccagctactaggtagtctgagacatgagaatcacttgaacctgggaggcagaatttgcagtgagctgcgattgtgccactgcactccagcctgagtgacagagagagagactgttaaaaaaaaaaaatccaagtgtcagaagcctcaaagatcgaaactagacaaactcatgaagatgagaaagaatcaacaaaaaacagctgaaaggccagagtgcctcttctcttccaaatgatcaaaatgtctcttcagcaaggtgcagaactggacagaagatgagatgcatgaattgatagaagtaggcttcagaagatggttaataacaaactctgctgagctaaagaaacatgttcaaacccaatttgaagaagctaagaacctcgataaaaggttagaggaactgttaactagaataaccagtttggagaggaacataagaggatgagatgcatgaattcacagaagtaggcttcagaagacggttaataacaaactctgctgagctaaagaaacatgtttgaacccaatttgaagaagctaagaaccttgataaaaggttagaggaactgctaactagaataaccagtttggagaggaacataagaggatgagatgcatgaattcacagaagtaggcctcagaagatggttaataacaaactctgctgagctaaagaaacatgttcgaacccaatttgaagaagctaagaaccttgataaaaggttagaggaactgctaactagaataaacagtttggagaggaacataaatgacctgatggagctgaaatgtttggcatgaggcccagtcactagggccctttgcgactgggctcaaggaacacaaaaacgttatcttgtttttcaataactaacatataggaatagattgaaacagagatttctctgaaatgacactacatgaatgcctcaatgaatgcctcaagggggtcacacaaccggttctgagacttggtgaccattgtttgtgtctgtgttcaatttatttcaaaattaatatttaacttttcctccacaaattcccctgtcttgatgaatgggctctgtctaggcaaaaggcctgtctttatgaatcagctctgtctagacaaaaggcaaggtaaaacccttgggctgttacacaacctccgcctcctgggttcaagcgattctcttgcctcagcctccggagtagctgggactacaagtgcacaccagcacacccagataattttttgtatttttagtagaaatggggtttcaccatgttggccaggctggtcttgaactcctgactcaagttatccgcccaccttggcctcccaaagtgctggaattagaggcgtgagccactgcgcctggttctaaatgatttctatttcctgtaacaatttgaaattacttaaaggttgtttcaaattgaaaaaaagaatgtagataaaatataaaaagttaaaaaaattacaagtgattatgaaatatatgtgtaaatctcgagaggtcaaaagtgacaaatctgatttatatataaggttttattaaaattagctttagtattgataatacactattaccaaagtaaaagttgattttctaacaaaaattttatgtattattaatatgacagcaaaatacttctgttcaccttttgaatacatgcaaaaagagagagagtaaaaaagagatagaattttcccttgctctagggtgggcctggctcagctcagggaggaagccctgcctgaaaaggctgcagcttaggctgttactctttcatcactcagcccagcatctgatcacatcctctgtcactcagggactgagtgggcggggccttaagcattatccaatcagagacgctgggctggaaaccgtccaatcaggcaggcagctggagcaaagaggacggcttccgggtttggcgcggcctttgtctctcgctgcatctggagctctaggtcgcctcttcgctactctgtgtcctctgctcctagaggcccaccctctgtggccctgtgtcctgtaggtattgggagatccacagccaagatgccgggaccccttagaagcctagaaatggtgagagtgcccattggacatcctgagagaggggagggactggttgatgggaagtggctgtggagggactcaggcctccccgtagtcagctccacaatctgcgtccggacttctccttacccagctcggcctcagtccccttcagccataagatggtggctgcgctgacagccggtcccggggcgtcctgtctcttccctgcgcagtgaccgtgccctggcctggcgccctctctgtgcagcagctctccacccgcagcttcgggtctctcccagatggtgcgggaaccacgagaaggtcatcaggggagaatcttgactcggggtgcgggttcacgattcggaagagctttggtccgtggggttcacagtttctcttttcttttgttaaaaatttatggggccgggcgcggtggttgacgtctgtaatcccagcattttgggaggcgaaggctggcggatcacttgaggtaaagggttgctaggacaactaaattcctcttcaaagactcaacttcctgatcagaagttgtaaaagttgtaaaacaaccctacccctttttctcccttttccttttctcgcaaatcgctcgtttatcctatttggaaaaagtttgggtctaagccaaccgggatcagcttagattgtgcggtctgaccccagccaataggggaaggacacaaaaacaaaaactacgttggggttaaaaacccattcctggtcgggcgcggtggctcacgcctgtaatcccagcattttgagagacctaggcgggaggatcttgtggtcaggagttctagaccatcctggccaacaccgtgaaccccgtctctactaaaaatacaaaaattagccaggtgtggtggcaggcacctgtaatcccagctacttgggaggctgaggcacgagaattggttgaacccaggaggcggaggttgcagtgagctgagaccgcgccatcgtacttaagtgtgcgtgacagagcaagactccttcacacacacaaaagaagggccaggcgcagtggctcacgcctgtaatcccagcactttgggaggccaaggcaggcggatcacctgagttcgggagttcgagaccggcctgactaacatggagaaaccctgtctctattaaaaatacaaaattagctgggcttggtggcgcatgcctgtaatcccagctactcgggaggctgaggcaggagagttgcttgaacccgggaggaggaggttgcggtgagccgagatcgtgccattgcactccagcctgggcaacaacagcgaaactccgtctcaaaaaaaaaaaaaagtaagaatcttaaaattttcttcctttatgtaaacactgtttgagtaatttcactggatttttcaaacacttagtttcaaaaaccaagtgaataacactgacatggaaattaaagcttgaacctagtaattccaagctaaggctaatatgaagtctgcaaaaggagggggttaaaaaaaattttttttttttgagacagtcttgctttgtggcccaggctggagtgcagtggcgcgatctcggctcactgcaacctccgcctccggggttcaagcagttctcctgcctcagcctcccaagtagctgggactacaggcactcgccaccacgcccggctaatttttgtatttttagcagagacggggtttcaccatattggccaggctggtgtcgaactcctgaccttgtgatccgcctacctcagcctcccgaagtggtggggttactacattttttttattttgacatggagtttagctcttattacccagtctggagtgcaatggtatgatctcggctcaccgcatcctctacctcctgggttcaagggattttcctacctcagcctctggagttactgggattgcaggcacgcgccgtcacgcccggctaattatgtgtgtttactaggggtttctccatgttggtcaggctggtctctaactcccaacctcaggtgatccatccgccttggcctcccaaagtgctgggattacatgcttgcgccaccgcgcccggccaacaggaggttattaaaggcctagttagttttttctggggagcctcgcctgcagatgtcccagcctgctcaccccacccatggaaggagcctttatcctgagagaagctacggagccctggaaagctggagccccacaggtagttaagattaaggtgaaaggaaactgggagggtcttactgataataaagctattgttttgaggcactttttagactttttaagataaaaacgtcagatttatgtaaaaaaatgaattagtattggaacaggagaaagtaccaactaattataaggtctctgtggcttgcaaaaatgtaggcagaaaagggcttttttcctagggaggagcaaacgagattagaaaaaagcggggaggggaatgacaaatggagggtgaaaaagtcagattttagctcagagaatgtcttaccctgaaatcaccgtgttcttagaagggacataagatggggttgtatgttttttttttttttttttttttgagacagtctcactccgtcgcccaggctggagtgcagtggcgcgatctcggctcactgcaagctccgcctcccgggttcacgccattctcctgcctcagcctcccgagtagctgggactacaggcgcccgccaccacgcccggctaatttttttgtatttttagtagagacgggtttcaccgtgttagccaggatggtctcgatctcctgacctctgaccttgtgatccgcccgcctcggcctcccgaagtgctgggattacaggcgtgagccaccgcgcccggccaaaatggggtgtatgttgactcagactgagggtagctcaaaattcaggagcctgagggagggagataaataaagtttgattaagaaatattttattttaggccaggcgcgatggctcacgcttgtaatcctagcaccttgggaggctgaggcaggccgaacacctgaggtcacagcctggccaacacggtgaaaacatggtgtctactaaaaatacaaaaattagccaagcgtcttggcaggtacatgtaatgccagctacttgggaggctgaggcaggagaattgcttgaacctgggaggtgaaggttgcagtgagcagtgagtcaagatggtgccactgcactccagcctgggcagcagagtgagacttcatcacaagaaaaaaaaaagaaatttgaccactgaagacatattcagctgatttttctaatgagaaaaaggagaaaatgtgcagtgtatgtctggctgtgtgacaggtaagaaaagagagcaccatctaagtcataatgggaagggtgtttctgtccatcagctttttctggagtacacaacaaatggagaattttattaatcacaaatgttttccatgattatctatgtgtttcatctttcctcatgtcttttctttgttgtatgcatttcttccttttggcttttcctgggctgcatcttatatattaaaccggtaaacataactacagtgttttgttcagttctgtgaatagctctaccaaattattgaacttcaggaaggtttcaggagtcccgagttttcaaacattagttcaaaagaatagatgggcccatagggtttgtgactggcatctgcagtgaggacaatgttgtgggaccgagggtctatgctgactttaggtgctgtcagaattcaaatattaggcaataagtttgtgttggagaaatgtttgatgttcagcaaactctacagatatggtgccagtaaaaagatatcacagaggcctggcctggaacaaaactctgggtgtttgggattgggaggctccactctcctgtacacaggctgtcacactgcccattgtcctgtgattccaggtcttctcccagggtgacagaggactgaaaacttagagaaaaggagctctgattacagacccccttttattgcagctatcaccacggtgttcccacccactcacaaacacacacactagacattaacgtgtccacactcctcccaggactaggcatcaccctcagaaacttcaccacggcatttttgatcctagtgtttcttgtgtttcttgtcaagaacccacaagtctctacaagtctactggcatgtctccaccccagacactgaatctgcagcagcaacctgttttctccaccatcctaggatctgggccacatgtttataatttcatctgcctacatgcacacagaaataaatcagagtacagccccacctgggccactatctgtagtgaaaatcattccattcacctacattgcactctctcccacccaggaattattttttttcttttagcttttatttttggttcgatgtacacatgtgggtttgttatacagttaaaattatgtcatggggatttgttgtgcagattattttgtcactgaggtactacccatagcaccaaacaggtgtgttttctgatcctcttagtcctcacaccctccaccctcaactaggcctcagtgtctgttgttctcctctttgtgttcatgtgttcttattatttagctcttaataacatgcatttggttttctgtttctacgttagtttccttttttttttttcctttcattttgttttgtcttttgagctggacttttgctcttgttgtccaggctggagtgcaatggtgcaacctcggctcaccacaacctcaacttcctggttcaagtgattctcctgcctcagcctcccaagtagctgggattacaagcatgcaccaccatgtctagctaattttgtacttttagtagagacaggatttctccacgtgggtcaggctgatcataaagttccaacctcaggtgattacccggcctcagcctcccaaagtgttgggattacaggtgtgagccactgcacctagcttttgcctactttttttttttgagagagagttttgctcttgttgcccagactggattgcaatagcgtaatcttgaccaactgcaaccttcaccttcgagtgattctcctgcctcagcctcctgagtagctgggattacaggcacctgcaccactcccagctaattttttgtacttttagtagaaagggggtttcaccatgttggccaggctggttttgaactcctgtcctcaagtgttctgcctgccttggctttccaaagtgctgggattacatgcatgagccaccatgcccggcctgcctactttttaatgaggttgtttgtttttttcttgtaaacttgtttaagttctttttttttttttgtgagatggagtcgcttagactggagtgcagtggcactatctcggctcactgcaacctctgcctcctgggttggagtgattctcctgcctcagccttctgagtagctgggattacagacatgtgccaccaccacaccctgctaatttttgtatttttagtagagacgaggtttcaccctgttggtcaggctggtcttgaactcctgacctcgtgatacacccgccttggcctcccaaagtgctgggattacagtcatgagtcaccacgcccagccaagttcttaataaattctggatattaggcctttgtcagaggcaaagtttgtaaatatttttgtttattttgtagattgtttactctgttgatagtttcctttgctgtaaagaagctctgaagttcaaataggtctcatttgtcaatttttgcttttgttgcagttgctttgggtagcttcctcatgaagtctttgccagtttctgtgtctagaatggtatttcctaggttatcttgcagggtttctcataattttgttttacatttaagtctttaatttatcttgagttgatttttgcatatggtgtaacgaaggggtccagctttagtcttctaaaaaatgctggctagttattctagcaccatttattaaagagagaatccttcccacatttctcttgtcagctttgtcaaaaatctgatgattataggagggtgacattatttctgggctctctattctatttcattggtcttgtgcactcatggattttatataacatctttctctcttctggttttaaccccactaacgttctttcaagcgcatacagtatgcaaaactcaggtgtccaagagttcaaaactccttaaaaacttccaaaaaaaggccaggtgtggtggctcatgcctgtaatcccagcacttttggaggctgaggtgggtggatcacgaggtcaggagatagagatcatcctggctaacatagtgatacccatctctactaaaaatacaaaaaaaaattagtcaggcgtggtggcgggcgcctgtagtcccagctacttgggaggctgaggcaggagaatggcgtgaacatgggaggtggggcttgcagtgagctgagatagtgccactgcactccagcctgggggacagagcgagactccgtctcaaaaaaaaaaaaacttccaaaaaaatttttgccattgtctcatttcttaagggatttagattatatatagttatttttctctgatttttaaaaatatatgtaaattatattaacagctaaataccttttgtcttttttctgactccagattatctagaacttcagatttattgctttgtttttggttccaaaaagtttattttttaatttttagtcctttaaatagacacagatttatttagataaaagctaattttaagggcacacagaagcttagcacaaagataggatcaaatttagcaatacataatggtaaacattaaaagatactatgtttctttgacagaaaccagattatccaaggaaattatccaatatttgcaggctgaagtacttatactgcaaaaagaagaacagttcagtgcgtaaactgaacagtggagtctgtagttgtgcctggctttctatttattacttcagaataattagcatagttatgtgtaatgtttgtagacaagctgcatttatatacatttaacagtattttgtttttctttctttctttcttcttttttttttttgagagagtctctgttgcccaagctgcagtgcagtggcatgatctcatctcactgcaactgctgcctcccgggttcaagcgattctcctgcctcagccttccgagtagctgggattacaggcatgcatcactgttcctggctaagtttttgtatttatagtagagatggttgtcaccatgttcgccagtttgatcttgaacttttcacctcaggtgatccacccatttcagcttcccatagtgctaagattacaggtgtgagccataaacagtattttctaaaatagtatgaatataaagccacaatacttactttgaatgaatcacttaaatggttattttaatattgtaatttatacttttgaaatatagtgttttggctgaagtatagttttaattattaaaaatgctacatatattatgactagtgagtaaacacaattttagtgtcttttatttcattaaattggtatgctgctattacaggacaaataaagacatgtgatgtggccacccaaaaaccataatagctcttcagtttgctatgttgcaagttctaatatattccactatatgaacatagtcagattctatttcttcatcaaaaagtgttgttggaagttgtcagatgtatttcaatatagaacctccattcaatggctaggagatgacagaacagcagagatgggaaagaaactttataaaaattcttctgaaaatctgccacctttcttcataatgctcatgtttctcttgctgagagtagctgtgcgctttgggtgtttagagagaaattgcttttaggagaatattttctggcagacatgatcaattttatatctaatctgagctttttcctaatatcattttaacttttttctctccagtgctttgggtgtctgtttcagaagccctattaatttttttttttttttttttattgatcattcttgggtgtttctcgcagagggggatttggcagggtcataggacaacagtggagggaaggtcagcagataaacaagtgaacaaaggtctctggttttcctaggcagaggaccctgcggccttccgcagtgtttgtgtccctgggtacttgagattagggagtggtgatgactcttaatgagcatgctgccttcaagcatctgtttaacaaagcacatcttgcaccgcccttaatccatttaacactgagtggacacagcacatgtttcagagagcacagggttgggggtaaggtcagagatcaacaggatcccaaggcagaagaatttttcttagtacagaccaaaatgaaaagtctcccatgtctacttctttctacacagacacggcaaccatccgatttctcagtcttttccgcacctttcccccctttctattccacaaaacagccattgtcatcatggcccgttctcaatgagctgttgggtacacctcccagatggggtggtggccgggcagaggggctcctcacttcccagtaggggcggctgggcagaggcgcccctcacctcccggatggggcggctggccgggcaggggactgaccccacctccctcccggacggggcggctggcctggcgggggctgacccccacctccctcccggacggggtggctgccgggcggagatgctactcacttcccagatggggcggctgccaggcagagggtctcctcacctctcagatggggcggccaggcagagacgctcctcacctcccagacggggtcgcggctgggcagaggcgctcctcatatcccagacggggcagcggggcagaggcgctccccacatctcatacgatgggcggccgggcagagacgctccttgcttcctagatgggatggtggctgggaagaggtgctcgtcacttcctagatgggatggcggccgggcagagaccctcctcactttcagactgggcagccaggcagaggggcccctcacatcccagacgatgggcggccaggcagagacgctcctcacttcccagacggggtggcggccgggcagaggctgcaatctcggtactttgggaggccaaggcaggcggctgggaggtggaggttgtagccagctgagatcacgccactgcactccagcctgggcaacattgagcactgagtgaacgagactccgtctgcaatcccggcacctcaggaggccgaggctggcggatcactcgcggttaggagctggagaccagcccggccaacacagcgaaaccccgtctccaccaaaaaagtacgaaaaccagtcaggcgtggcggcgcgcacctgcaatcgcaggcactcggcaggctgaggcaggagaatcaggcagggaggttgcagtgagccgagatggcagcagtacagtccagcttcggctcggcatcagagggagactgtggggagagggagagggacagggagagggagagtcgaagccctattaattaatcccatgatttctgattaagctaggctgtcacagtgagaacttttggagctatctctatctggactcatgctggaaattcagcagtattttttccttgtcaccattataagtagaaactgaggttgaaacactgctctcattttcattattgtgaatgtgtaattctacccaggaggcctgcaggctctcctcctgcagctcaggcctcactctctgatgtgacactagagtgctgctgtggcaaatggggttcatataaaatgtgagctgtgctctgggctgtgcctcagtggcagatggtagaggtcaagagagcatactagcaaccaggagaaagcaagcaggagtgctgtagcccactgccagtgagtacagagccactcctctaaactgtaactagccaaaatatagaacactattcaaccatttttgtagcagagtgaaatcttagcttcagcaggtacctgacttcaagctgctaaaataactcctgttatgaagatgtgaaaagtttatttgtcattgaatataagcaattagcatacacagatggcctcttcaatttccaggtagatttaagatgaacgatgtatgacatggtgctttaaattcttctacttatggactaattatgttgaccatctttctgtcattgcagtctcttaagcagatggactatgatgcatgtcacattcaagtttaattgtaaaataaaaacgtttgttttttgagatggagtttcactcttattgcccaggctggagtgcaatggtgcgatctcagctcactaaccccgcctcccaggttcaagtgattctcctgccttagcctccctagtagctgggattgcaggcatgtgccaccatgcctggttaatttttgtattttttagtagagagggggtttgtcagtgttggccaggctggtctcaaactcttgacctcaggtgatccacccgcctcggcctcccaaagtgctgggattacaggcacgagccaccacacccagccaaaacgttttctttctgttctattattgtggagtttttctggggctgtaaacatttgttctttttttttgagacgaagtctctcatcccccaggctggagtgtgatggcgcaaacttggctcgctgcaacctctgcctcctgggttcaagagattctcctgcctcggccctttgagtagctgggattacaggtgcctgccaccaggcccggctaattttttttttgtatttttagtagagatgggttttaccatgttggccaggctggtctagaactcttgacctcaggtgatccacccgcctaggcctcccaaagtcctgggattatagacatgagccaccatgtccagcgaagaaaattgttcttctcttttttttctttttgagacaaagtctcactctgtcacccaggctggagtgtgctgtggtgccttctcggctcactgcaagctccacctcctgggttcatgccattctcctgcctcagcctcctgaatagctgggactacaggctcccaccaccacacctggctaattttttgtatttttagtagagatggggtttcactgtgttagttagatggtctcgatctcctgacctcatgatctgcctgtctcggcctcccaaagtgctgggattacaggtgtgagccaccgcgcctggccaaagaaaattgttcttctaattattgtttccaaacactgtctagaattaccagacatgatataaacacataaggtgccaaccagaatttagcaaggcctttccctgtcaggcttccagtcaattcacacttgtgcagcaaagtgcatgctgtcccctaaatatgcaggcagaattgtgtctctatttgttatctatagtcctgtacattcacttctagagaggctagatcagatttctacaaatttcatagggcagcaatcaatcattttatctctttcaatgactcctgtatcttcagacttgaaacagattcagagaccatggggcccacaaacccagttagagtaacatgtgtgcattgagtagacatgttgacaagagaatctccactttcaccttcctcctcttgctaaaatgctcacaaatgtgcaggtaacacctgctgctcctcctgccattcaggccctaaatctacagctctatattttgaatccagatcttgagatttgggaaataaaaaacttttgtctaaataaagcaggttcttttggttatcaaactcagagacatgttaaaatgaaagtgcagttatgtctttctcccactttgaacgatgtattcatctattgaaactgttcactattggcacaagtgactataaattaaactaatgatgccacattggacactatcccatgccctaaaacataatgatagatatctaatcaataatcaatgttatttatgtaaataaataaaaacttttgacaaacaactctgcatcagcccactttctgtccctgtcttgtcttgacatatcttcctgtaaatactactaatcaaagtgtagattccaggcaacttgaatctttgctcccaggttataacccttaagcttgacccaaataaactgtctacttatattcatgttatgtcaccttttttttaaatgtagacttattatttagaatgtgttagagcagcctctatgagagctctcttttgactgtactccacttggtgtaacacaaaaggatgcagagccaagttgatcctacctagaatttgcagataaggtctgccctctgcctgggatttaaaaaaaaaagccagactttggatagagaatgtacagaaaattaacaaaagtcattttctgcattgtaagttgtcaagatagatatcttacaggccccatttgggagtgtggcattttgagatttttcacatcttgttcattggcctgctacagtgatgtgagaggctccaggaggaaatagaatctgatggcagaatctgtaagtgtaaataatcatcttaggagtgagagatcaaggccacaaagtatccagagccttgatcacaactataattacctgtaaaatgtgatactggagtagagtatttttgtttctttctctcatccaagagctagcaaatcaggacagatgatgtaggttctggagctccaccaaggcagttgttttctattcagaatcagcctgagtttctccagatggcttatcattgggccaacagccctggttcaccaggaattccctcacaatcacctaggtgtctttgaggcatttgaggatgtccagagcagaattgtgttaggctgacaagagtggttaattctgcttctgtctcagtgtaagagaaatgagtcatcctgtgttcattcatgccctcatacaagaggtgccttttttggtacccagatcagagtttctccagtttcctggtacttggatgataaacaaggaggagatctggagacccaaatagataaactagttgcttccatttcatatggccattaaaaaaatacgtgaagcagtcatggttcctacagtccagaaacttttagtctagaccagcaactggataaataattgaattgtgcattgtatggttggcacaatatatagatgtgtccagaaccttgggttttatttaggccactttatgccgttatgacttctgaattgtacacctgaagggatatttatgaatagaataattgttattataattttttttctttagtcagaatctcactgtgttacccaggcatgagtgcagtgacatgatcttggctcaccgcaatttctgccacttgggttcaagcgattctcctgcctcagcctccaaagtagctgggattgctggccccagccactgtggtcaggctggtcttgaactcctgacctcgtgatccacccaccttggcctcacaaagtgttgggattacaggtgtaaggcagtgcacccagctgtataatttctacttttttttaccttctaaagtgtacatattgattttctaataaaattaccctagaaaaccttaagggatttgtttaaattgtgtattagtatatagtataaagttgacagggcagtggctagaaaaattaaaattataggaactctgggatttaagtttcttttaggtaagcttagaagaaacaaaactggaagtaccccagtggcatagagaacagaattctacataagtcctcacactgcctgagacctgatcagattcatgctttttggaggcgttatttaggtctgaccctaccctggagtcttgcctcacaggactgattagtagagatcagagttttggctggtgaatcctgctgcctttctagagctggtgctcacaattccctgaatcccaaaagcagatgaaagggaaaaatagtccgggcgcggtggctcacgcctgtaatcccagcactttgggaggccaaggcgggcagatcatgaggtcaggaaatcgagaccatcctggctaacacggtgaaaccccacctctactaagaatacaaaaaattagctgggtgtggtggtgggcgcctgtagtcccagctactgaggaggctgaggcaggagaatggcgtgaacccaggaggcggagcttgcagtgagcccagatcgcgccactgcactccagcctgggtggcagcgagactccatctcaaaaaacaaaaaaaaaaaaagggaaaaataaagtacgtattttagggtcttagtttttaaattttctgttaaagccagtgtttgcagagacattctatttagcaacttgttttctattcttgcagatccagtagttgctccacaagtcacagaaaagtaaatatgaacagaataaaattttctctaaattacattaaattattcctttctatctctttcatctgtctatattttgcttttacagtgttttaaaaaaattcatgacagagaaacagaagaagaaataaaaatgccgcaccctttacctaaatcctaaagtttattaaacacttagtaccagctttcagggtgttatgagaattaaatcacagaatgtgctatgcccagcacagtgctctgtatcattctcttgagcacaaagtacctgcttaataaacattgcattagtacttgtgtacatgttgttttttaaatacagacttactctgtcatttctgccttcagtttcctctataaactttaaagagccagcgaagcatataaaactttagggtggagatgcgttgtccctatttgtatcagaagtatttggttgtgaaaagagtgctaaatgtaagggaccctgtgctgttcctgctttctctaactaatgctaataatgagccaaggggaagcaacttcagcattgacaggggacttgtttaaaacacccattcatggacccttttcaagcctccagaatcacattacataaagtggacccaaaattaccaagtgatttataagcccattaaagcttgagaggcaatgcttagcttagtgattaccagcccaggcttttccttaggaacacatggccaatttgcagaaacctcttgtgccctccccacagcttctgtttgttctgcatggaagcacttatgttgttttaatgaagggtctcatgtgactctaaggtgaggccagaatcaagtatgagcacttcaaaatacaatacaaaggagttaagttccacctttgcactaaagggtggtcacagggcctgttctgtttgggtttggtacagacaggtcagtgtggtgcataattccattactggaaattgctggtgtctgtggcagggagggcacctgaggacaggaaatgagaaacttatatttctatcttcatggagcaattcattgttccctgaatctcttctgtttcaaaggacagaaataggtgggctttttctgtcattttgccagttgatgtcatgccagcaggtaatcatgtgttactgatacctttaaaggcatgttctcaagatgcaggtgtaatttttccagagaatctcatctgagaaggaattccagaggaggaggaggagaaaaaaaagtggctcttcttaaggtaaacgtgtctcagatgaagagctgtgtccactctgcctcctggacccccatgagtttagtactcacaaacctttacttctctacttgtgttttccctccctgagtttggttttactacttaaaattcttatgatagtcaagggtctctgaaaaatatttctttcctatatcccagagctttctctgcattctctatgtcatagcttcttatatgccatgcagaattctcagcaagaatttgtaatctgcaatattaaaaatgttccctttgtggctgttgaacatggaaagatgtggatactcaagatttctgttggggaaaattgtggtccttagtatagatgaagaacatgtaatgttgaggcttcatctgtatgttccattagctctatgcagaacaggattaagaaaatgcttttttatatggaatggcatttattatccagaaagttctgaaagaaattattaggagatacctgctctcttgggtgctaaatgaagcctacttaaaattactactaaaaattacagaacataggagttatcaaaaactttgaagttagcataaaacatgtttctttatggttaaattcagattttatttactttctttgggaggaatatttcaacagtgatgctgtgttcttctgtgtgaattaggacatcataaaaatttatcgtagtgcagttaatggttaatgattcagttggtgaaatagctctctgacagatttttttcactatagagataattatttttctattcattattatgtttatgcagctgatatgcataaacctcacattaaatctggcagctttcttttttaaacatatttttcttagggaaatgaagcctcttatctttgtttacaggctagaaaatctgaaaaaaacacaggctcttgcacttactgcatttgacaaaatatcatttttgggacaaaaacattaacattattggtgagcttgttagaaattcaaaaaatcagactttatgccagatcttttggaaaaaaaaatcctgcataagaaggacttcagcttattgtacatgttaaaattggagagatgacttctaactcaacatgtcttttctgtctgaaaaatattcataactgattctgtatgatgtaaatatagcactcaaaaatgtacatgttcatgttcatgccctttattttatactttattatctagaaaaatatcattatatgaactaatgttgtggatcttaggctgctcttttttttcagagatagagaatacattagaaaatatttctgtattgaaaattattttattggataattttagtcaatcctataagtaagaatcagttctcttactctctcatttcaccttaaattaaaaattccaccaacggcgacttggtgaaaatgtgtgtgtgtgtgtgtttttcaggaatcattgcaatttagagatgtggctgtagaattctctctggaggagtggcattgcctggacactgcacagcagaatttatatagggatgtgatgttagagaactacagacacctggtcttccttggtgaggataacttaaatacataattcataaaaaaccccaaaagttttatttctcttttttgcagaatgattttagtaatttatcctttgcataaaagagttccagatgtcctttttccagaaaatcttcagaatttgtttatttagaaaagaatttcttcaagatgtttcatcttaatccaaactttccacattgctgagttgagctttattcttcactctaaattagtggtaatttcagaaatttagtggcataaaatagtgttgccctcagctgaaaatctcattgccaccatcagtttttgattcagtagtatcaggtagtaaatttaaaaagccttcatgcagggccaggcgcagtggctcatacctgtaattccagcactttgggaggctgagacgggcagatcacctgaagttgggagtttgagaccagcctgaccaacatggagaaaccccgcctatactaaaaatacaaaattagtcgtttatggtggcatagtcctgtaatcccagctactccggaggctgaggcaggagattcccttgaacacaggaggcagaggttttggtgagccgagactgagccattgcactctagcctgggcaagaagagcaaataccactctaattttgataggaagtttattgaatctatagatcactttggataatgtggcaatttaaaaatctatttggatcttctcttcgtagatttttattgtaaagattttttaccttcttagtaattttttaaagaaatttattatttaatggtatagtaaataagattttttctttctctattttatcagatagtttaagtgtttgagaccatacatatacttgtatgttaattttatgttttgctaatttgctgagtgtatttgtcagtttagaaaggttttaaggtattgtttatgttttttttttttttttttttttttgagatggagtctcgctctgttgcccaggctggagtgcaatggcatgatctcagctcactgcaacctctgcctcctgggttcaagcaattctcctgtctgagcctcctgagtagctggtactactacaggcacgtgccgctgcacccagctttttgtattttagtagaaatggggtttcaccatgttggccaggctggtctcaaactcctgaccttgtgatccacccatcttggcctcccagagtgctaggattagaggtgtgagccactgcaactggccctatttatggtttttaaagtactgcttaatgttttttaaatataagattgtatgatctataaacagcaactttttacttattttactccatctccaaaaaaaaaaaaaagaaaccttaaagttgaaagtattttctaaatatttagaaatttgttatgaattagtattttggtattaatttactagaatattttattacattctttctgctgagcacattactagcttgtaattgagaaatataagcaagattaatgctatttatttttaatgaaacaggtattattgtctctaagccagacctgatcacctgtctggagcaaggaataaaacctctgactatgaagagacatgagatgattgccaaacccccaggtaggtgcgaatgaaaatgaacacaacagacaatgcagataagaggtcccaaggtcaaaaagaaagccagtccttaaaatgtgatctgggaagctgtgttccaaaggaaatagttcctgggcagctgttttatttatttatttatttatttaatttttctctcacaaagggacatctgtctcatgcttttaaattctctaaggattctactattctttcggtgagcttccttcaagttcacagtgagagcgaaattcctctttatggcatataagtgattgcacaatctggctgcttttccgttgccttggggacacacaaatatctgcgtgattttgagaaactaaaacccttttttaagttgtctttttgcttcagatctgaaatgtgtgacagtattagtttttgttgcattttttgttcattttttctgcacagtccattctgtttttattactatatagtcttgaaatatagtttgaaattataagtatgatatccttctgctttgatctttttcctcaagattgctttggctatcaaagttattttagtatcacgtaacttttagaaatgtattttccattactatgaaaaaaataccactgcaattttgataggaggtttattgaatctatagatcactctggttaatacggcaattttaaaatttatttggatcttctctaatattttcataggtttttttttttttttttgagaaggagtcttgctctgttgcccaggctggagtgcagtggtgtgatcttggttcactgcaaactctgcctcctgggttcaagcaattctctgcctcagcctcctgtgtagctgagattacaggtgcatacaaccatgcctggctaattttttttgtattttttgtagagaggggtttcaccatgttggccaggctggtcttgaactcctgaccttgtgatccacccacctcagcctcccaaagtgctgggattacaggcatgagccaccccgcccggcccatagtttttttattgtaaagatttttttacctccttggtttttttctaagaagtttattacttaatgctatagtaaataagatttttttcttcctctattttatcagtttgttttaagtgtatgagaccatacatacacttgtatgttaattttatattttgctaatttactgagtgtatttatcacttcagacaggttttaatgtactatttattgatttttaaatacaagattatacgatctacaaacagcgactttttacttatttttctttaatttcaatggatttttttatttctttgactaattcttctgccacatgcttccagtgctacattaaaatagaagcattgacaatgggcacaatatagttttgtattggtgcctaaatttgatggagcaaacacctcttcaagtttttttttttttttttttttgagagagtctcactctgttgcccaggctgcagtgcagtggtgcagtctcagctcactgcaacctccacctcccgggttcacgccattctcctgcctcagcctcccgagtagctgggactacaggcgcccaccaccacacccggctaattttttaaaaatttttattagagacagggtttcaccgtgttagccaggatggtctcgatctcctgacctcgtgatccatccgcctcggcctcccaaagtgctgggattacaggtgtgagccaccacgcctggccttcaagtttttataaactgattttagaaggtaaagatcttttgttgggcccttagggtgatgagatgccctctgaatttgtagtggagagggggtgtagcttggtgacaaggctgctgggtctgcactagggtccacctttagttggcttgttacaggggcttgggtagttgtacttctcattttatttttggacagactgcatatccttcagggctttgctccgtagttaaaacactagggtatgtttttgtagtcaggtctgcatatggtgggccttatatctggatattgatgagtatggcttttattgagtatcagagagcattccctcagataactgtgggtttctatataggcagaactgaccataaactatcttgtttaagtgagtagtcatggagatagtcttttttttcaccatgtgtttaatgatgaatatatatttccttttgtgagagaaatacttgtttgatttgaaggtaattttcaaaaagatttataattctggattttttttcagtttttctttaaaaaaattgttttaaaaacacataacataaaatttaccatcttaattcaagtgtacattttcagggccaggcatggttgtggctcccatctgtaatcccaggattttgggaggccaacacaggaggatccctggagcccaaaagtttgagaccagcctgggaaagatatggagacccctctttataaaaataatttaataattgccaggcatggtggtatgcagctgtggtacctgctacttgggagatggagggggagtcaaaattgtgccactacactccagcttgaatgacagagtgagaccctgtctccaaaaaacaaaaaaaagctgttcatttcaggcatgttaagtatattctcattgttatgtaaaatacttctagacactttacatcttgtaaaactaaaactcaatacccattaaataacaactgctcattttaccctctctcaccctcgacagacaaaccttccactttctgttttatgatttgactacttaagatatccataattttgttactggattaattcaagtgacataatattctcaatgttcatcttaaaatgtgacaagattattctttttaagatggaataatattccattgtatgtatatgttacatattttgatgtgtttataaatcaagagacatctgggttgcttcaaccttttggcttttgtgaatactggtgcaataaacatggattttcaaatatgtcttccaggtcctgtgttgcttttctttttttctagagatggattctcactctgtcacccaggctgaagtgcagtggtgtgatatcagctcactgaaacctctgcctcctgggttcaagcaattctgcttcagcctcccaagtagctgtgattacaggtgcccaccaacacacccagctaattttttgtatttttagtattatggggtttattatgttggccaggctggtctcaaactcctgatctcaggtaatcacccaccttggcctcccaaagtgctaggattacaggcttgagcacctgggcctggcctgtgttacgtattttgtaaatagatataataagtgaggaacatttataacatttttaaataatggctgcatctttgttttccagcaagaagcaacatgggtttcatttttattgcaacatcaacagattgggtgtttttaaaaaaatttacagtggccattctaatggatatgaggtgattttgtttgtcattgtgtttttttaatttctctacaaatcagtaattttgtgcattctttcaaatgctttttcccatttgtgtagttttttgatgaaaaatctttttgttcatttttaaatcaagttattgaactttattgattagttttaagagtttttatttattttgaacattaacttccttcacatgaaatctgcaaatgttttcatccattttctaagggatgttgccacttttgaattttcttttgatgtacagaaattttgatgtctagtgtagttaaacttttcttgtatttgttgctcatgcatttaatgtcgtatctaagaaaatggtggcaagaccaatgtaatgtccttttcctgtattttttctaatagatttgttagtttctttatgtctaagtattttgtttaaaatatatttttgtatcgttcaaggaaataacccaattttattttatcagtgttgatattcagttttcaacatcattttttgaagatattacttttctctattttgtactcatagcaactttttgaaagaccatttgatcatatatagaagggttcatttctgagctctctattctggtctttcatctgtttatctttgtgtcagtatcacattgtttatgttactgtagcctttaactgtaggttgtattgacatctgtgaagaataaaattttttgacccctgagcaagaatatgttgaatcagagtgttttatattcacatatttttgaatttgccaatttaccttttgcttttaattcctagtgtcattcagtttttgttagaaaacacacaatgtataattttagtgtttttaaattgatttgttgttgttttaagacaagatcttaccaacaccaaggctggagtgctgtggcataattttggctcactatagcctcagcctcctgggctcaagtgatcctttcacctctgttttctgaccagcttggactacagacatgtactaccatgtctgcctaattgtttgcttgtttgcagtgttaggatctcattatgttgtccaggctggtctcaaacttttggccctaatggatcctcttacctaggtctcccaaagtgttagggttataggcaagagccactgcaccccgtcagtacttttaaatttaataaaacttggtatgtgtcctaacagattataccagatgcaaataagaatattgtgtattatcttggttttgactggagagttttgcttgtgtctgtgaagcctagttggtctataatatggtttccatgttcatgttctccagacctcatgctgcaaaataaatcttcaatgttggatgtgggacctggtgggacatgtttgtgtcatggaggcaaatttctcatgaacggcatggtacatcctcttggtaaccaaaactttacactctattaattcaaatgagagctggttcattaaaagaacctggatccttcacctcacacttgctctgtttcattaacatatagtatgtccaattactctttaccttccaccatgattgtaagtttcctgaggccctcaccagaagcagatgctagcacacacttcttatagtctgtcaaactgtgagccacataaattatttttctttaaaaattatgcacttggctgggcacggtggctcatgcctgtaatccctgcactttgggaggccgaggcgggtggatcatgaggtcaggagatcgagaccatcctggctaacatggtgaaaccccgtctctaccaaaaatacaaaaagccgggcgtgctggtgggcacctgtagtctcagctacttgggaggctgaggcaggagagtggcgtgaatctgggaggcggagcttgcagtgagctgagattgctctactgcactccagcctgggcgacagcgagattccttcaaaaaaaaaaaaaaattatgcactcggctgggggcggtggctcacacctgtaatcccagcattttgggaggcccaggtgggtggatcacgaggtcaggagatcgagactctcctggctaagacggtgaaaccccgtctctattaaaaatataaaaaaattagccgggcatggtggtgggcgcctgtagtcccagctactcgggaggctgaggcaggagaatggcgtgaacctgggaggcggagcttgtagtgagctgagattgcgccactgtactccagcctgggcaaaagagcaggactctgtctcaaaaacaaagaaaaaaagaaaaagaaattatgcagtctcaagtattcctctgtatgcaaaataatatggtctataatgttgcgtaagttgtctgtttctcattttttctctgaattttctatttattattgcaaatggggtcttgatgtctacaatttttatgttgctatgtatgccttgcttcacttttgtcaatatttgctttatatattttggagccctgatgttatatacacatatacatatagatagataaataatatagttaccgattcctggtaaattaactcactttaccataatataatatcattctttgtctaatggtagtatttgacctatagcatattatgtctaatataattgtgaccacctcactcaattgtggttactatttttatgatatacacatttttttccttctgttactttcagcctatttgactcaatgctacaatgagtctcttgtaggcagcatactgtatgcttttaaagaaaccactgaggcattctatagctttttcttcatatgtatatatttatttatgtatttattttgagacagagtttcacttttgttgcccaagctggagtgcaatggcgtgagctcactgcaacctctgcctcccaagttcaagtgattcttctttgtcagcctcccaagtagctgggattacaggcacctgtcaccatgcccagctaatttttttgtattttaggtagagatgggattccaccatgatggccaggcttgtcttaaacttctgacctcaggtgatctgcccgcctctgcctcccaaagtgctgggattacaggcatcagccaccacgcctggcctcatttaactttgagatagggtctcactctgtcaaccaggctgatttgcatgattcactgatgccagaacctccaaaactcagatgatcctctcattttagcctctcaaacagctgggttacaagtatgtgtcatcatagccatctatgttttttgtattttttgtagagacagagttttgccatgttgcccaggctggtcttgaactcatgggatcaagtgatgagcctaccttggccttccaaagtcctaagattacatttgattttattaagtagtataattaatttatatttacaatgaataaacaaatgaagttgtcattagcagttagattgttactgttttatgtgtttctagtagttatatttttctcatctcctgttttactttcttaattttcattttattttgtactggcatgctttcattactttttatcttcttttgcatactttctataaatattatctttgtaatcatcttgaaaactggagattacatacatcttaaagttaaaacaatatgtttcaatctcataacttcaactgaatacaaaaactatgcctctatattttatggtttgttactgatataaaaattattttatatggtgtatctattaacatttatgcagatttacatatttcttatattttattaaaaaactttaaagtttttatgtaccatcttttttttttttttgaaactgggtctcactctattgcccatgatggagtgcagtggtgtaatcttggctcactgtaacctccaccaggcatggtggctcatgcctgtgttctcagcactttgggaggccgaggtgggtgaatcagaaggtcaggagttcgagagcagcctggccaacatggtgaaacgctgtctctactaaaaaatacaaacattatccgggcatgctggcaggtgcctataatcccagctcctcaggaggctgaagcaggagaattgcttgaacctagaaggcggacgttgcagtgagccaaggtcacaccactgtactccagcctggacaacagagcgaaactccgtctcaaaaaataaaaaaaaatatgtcttttgattggaaagatgattatatatatatttaaatcgttttctgcaatagaaaaacttactgttatttttattaattgttttatttgattcttctatctttttcactcattttctgtcttttttgtgtttttttaattttttgtattgatatgctttcagtttcttattttcttttgtgtatctatacagctattatcttagtggtaacatgggggattacataaaacctaaaagatccaacaatatatttgaatgtggtaaaaaaattaacttcagttatatactgaaattcttcatcattacatttgccttcaactttgttactgattttgctaattatattttttatgttgtatatttattaacagatgttaacaataatttctatacttttatcttttaaatttagagagtattaaaaatgttttctgtaccattatgatgttaagaaattccatttttgtgtatgtggatatcttttccagaaagttatgtattttcatagattatctgttgttttcttgcattatgttattttcagtggaagaaactccttttagcatctttgatgtgtatggtgtatgcagtgccaatatactttctcaggatttggttattttggaagcacttgttttatttggtagtacaattttgctgatggcattattgcatttgacagctttttaaaaaaattattataactttagcaatatcacagtttttttctgacgtgtaagaatgttttaaataaattcactggtgccggttgtggtggctcacgtctataatcccagcactttgggagactgagacgggcagaccacctgaggtcagaagtttgagaccagccaggctaacatggtgaaaccctgtttgtactgaaaatacaaaaaagtagccaggcatggtggcgcacgcctgtaatcccagctactcaggacgctgaggcaggagaatcccttgaacccgggagttggaggttgcagtgagccaagattgcatcattgcactccagcttgtgcaacaagattgaaactctgtctaaaaaaaaaaaattctctggttatctcatgagactatgcttataaatggaacatcatttttatcttgtagcacccaaaattctattcttatatgtgatttttgaaattttgcttatatatgtgtttgttataaatatatttgtgtgtatctaagtttgttcattcagctttttcatgtttacatcatattttcttttaataaatttttcagttttttatattttttatatccacgattttcggttttttggtattttagtatttctttttatagttgtctgggtttctatttttttcttatacagagtctttttctgtcaccgaggctggagtgcagtggcgtgttctcagccaggctgatcttgaactgctgacctcaaatgatccacccacctcagcctcctaaagtgctgggtttacaggcatcagccactgcacccaacctttttaattttatttttgagacagtgttgctctgtttcccaggccgcagtacagtggtacaatctccactcactgcaacgtttcccgcctggattcaagcaattctcctgtgtcagccttacaagtagctgggattacaggcacatgtcaccatgcccagctaatttttgtatttttagtagatacagggtttcaccatgttggccaggctggtctcaaacttctgacctcatgtattttcccaccttgatcttccagtgtgttgggattacaggaatgagccaccaacagtgggatgttcaattcatttggaattttaaaaattactttgtatactttttatggttgcttttgaaaagtttataatttttttgatggggccatgttctaatatttggtatacattatcatctttgatagagatttggaaattaacaaaaagctacctgttacaatctttataatatagctttgtcctggcgtagcatgaaatcaattgtcttggctagagattctgggaatttttcaaacatgtttttaggatgagtcttgtctaaaattttgtgtttattgtttagttaaatcagcttattcatatctcttcttaatagtcagtaatcacctgctacacccattccctgtttgcagtttctctgcttctctataatttacctttagactcagcaaactcaaactgtcattccaatgtatatcaccatttttttttagcattttatgtcatgggacacattatctggtgtctaaaaaagcccctagaagacaaataaagatgtatgtgccaatgtttcttgttttttaaaaaggaaaccaggagttggcaatttacatttttgtgtgtatgtgtgagacagagtctcattctgttacctagtctcaagtgcagtggcatgatcttggctcactacattctctgcctccacagttgaagcaattctcctgcctcagcatcccaaataggattacaggtaactgtaaccatgcctggctaatttgtttgtattttagtagagatggggttttaccgtgttggtcaggctggtctcaaactcctgacctcaggtgatcctcatgctttgccctcacaaatttctggaattacaggcatgagctatcatgccttgttggcaatttactttaaaaaaaaatttttttttgagatgaagtcttgctctgtcgcccaggccggagtgcagtggtgcaatcttggcttactgcaacctccgtctcctgggttcaagaaattctcatgcctcagcctcctgagcagttggaattacagcggcccatgaccatgactggctaactttttgtaattttagtagagatggggtttcaccatcttggccaggatggccttgaactcctgacctcaagtgattcacccatctcagcctccgaaagtgctggtattacaggaatgagccactgcaccaggttggcaatttacttttaaaggcacaatgttatactggagagcaggaagagctgttgcatataagtaacagaattttctttatcttctatgtgactgtttgcattgtgctcacctagggactttcacacacttaaaactcacttataaattttttacaaatgtattttggtcagtatgtttttgttacctttatatgtccaggaagaaattacagcttgtggcattttgctatgtcatcttgcttatgtagtttgtataattttataggttagatttgtaaagtatatttatctgagtctagcaattgaagtaatgtgtttttattgtttctttcagttgtgtgttctcattttgcccaagacctttggccagagcagagcataaaagattcttaccaaaaagtgatactgagaaaatttgaaaaatgtggacatggcaatttacactttaaaaaaggctgtgaaagtgtggatgagtgtaagttacacaaaagaggttataatggacttaaccaatgtttgacaactacccagagcaaaatatttcaatgtggtaaatatgtgaaagtctttcatcaattttcaaattcaaagagacataaaagaagacatactgaaaaaaaacctttgaaatatatagaaggtgacaaagcttttaaccagtcctcaacccatactacacataaaaaaattgatactggagagaaaccatacaaatgtgaagaatgtggcaaagccttcaaccggtcctcacaccttactacacataagataactcatactagagagaaaccctacaaatgtgaagaatgtggcaaagtctttaagtacttctctagctttactacacataagaaaattcatagtggagagaaaccctacatttgtgaagaatgtggcaaagcctttatgtacccctatacccttactacacataagataatccatactggagagcaaccctacaaatgtaaagaatgtgacaaagcttttaaccatcctgcaactctttcttcacataagaaaattcatactggagagaaaccgtacacgtgtgataaatgtggcaaagcctttatttcatcctcgatccttagtaaacatgagaagattcatacgggagagaaaccctacaaatgtgaagaatgtggcaaagccttcacccgctcctcacaccttactatgcataagataattcatactggagagaaaccatacaaatgtgaagaatgtggcaaagcctttacatggtctgcaggcctccataaacataggagaactcatactggagagaaaccctacaaatgtgaagaatgtggcaaagcgtatactacatcctcaaatctaactgaacataagacaactcatactggagagaaaccttacaaatgtaaagaatgtggcaaagcttttaactggtcctcagaccttaataaacataagagaattcatattggacagaaaccaagaacgtgacaaaggattattttattattattatttttttgagaggtaattctgctgttgtttcccaggctggagtgcaatggcataattttggctcaccacaacctccaccttctgggttcaagtaactctccttagtagctaggattacagggctgcaccaccacacctggctaattttgtatttttagtagagatggggtttctccatgttggtcaggctggtctcaatctcctaacctcaggtggtctgcctgctttggcctcccaaagtgttggggttacaggcatgagccactgtgcctggctgacaaagctttttaaggaagttctcaacccttattacacataattcatactggacagaaaccctacaagtgtgaagaatgtggcaagcctgtaacaagttctcaattcttttatttttatttgtttatttattttttgagatgcagtttcactcttgtgacccgggctgtagtgcaatggcatgatcttggcttactgtgacctctgcctcctgggttcaagccattctcctgcctcagcctcccaagtagctgggattacaggtgccaccaccattcccagctaatttttgtatttttagtagagatgggcttttgccatatttgccaggctggtctcaaactcctgacctcaggtgatccactcgcctcggcttcctaaagtgctgggatgacaggcatgagcctcaattcccagccataagctcttaattcttaagagacatggcgataattcatggtgaagaggaactttacaaacctgaaagatgtgacagtgcttttcccaacacctccaacttttctatgcataaaaaaaattatactacaccatagaaatgtatgaaatgtgacaaagcctttatatggttgccacactttattgtaggtaattcatacttccaaaatacctacaagtatgaagaatgtggcaaaacttttaatcagtgcttacaccgtatttcacaggaaagctattatccttgagaaaaattgtacaaatataaagaatatggaaaagccattaatgtccatcacatcttactcaacagaagaaggttcataaaagagcaattactgtgacaaaaatctttcagaaaatataagcctttaaggtgaagaagagtattgattctgaagacaagcattacaaatataaagaggtttgtagtacctttgcttgtattacagatcttattgcccgcgttttgtattagaaggaaaccctaaagcggttgccaaactttgtgcaacatcagggaatgtatattgaagaagattcctgcaaatgtaatgagtttggaaacacttcttagataaattatttgtggctgggcacagtggctcatgcctgtaatcccagcactttgggaggccaaggtgggaggatcacctgatgtcgggagtttgagatcagactgaccaaaacggagaaacccagtctctactgaaaatataaaattagccatgcatggtggcacatgcctgtaatcccagctactcaggaggcttgaaccctggaggcagaggttgtggtgagtcgagatcattgcactccagcctgggcaataagagtgaaactctgtctccaggaaaaaaaaaaatttatttgtgtataactttaaaagcagatttttggaagcattgtaattacattaaaagtatacttgttccagctgcgtgtggtggctcatgcctgtaatcccaacactttgggaggccaaggcaggtggatcacgaggtcaggagttcaagaccatcttggccaagatggtgaaaccctgtctgtactaaaaatacaaaaattagccatgcatggtggccggcgcgtataatcccagctgcttgggaggctgaggcagagaattggaattgcttgaacctgggaggtggaggttgcagtgagccgaggttgcaccattgtccagcctgggcaacagagcaagactccatctcaaaaaaaaaagtgtatttgtttccttaaaaaaatttttctgaaaagtgggtaatgacataatacagctttcaaattactttatgctgttattttattcttattgtattcacatgtgaaagcatgtgatcaatttttgctgcatcagagatattagagatagttttttattaattgggcatttatgaccttttctataaaagtaaggacattaaaatgtaagatgcatgatgaaaatataagtggagaggctctttgtagttaacctatatgaagtaatgtataaggtaggtcagagtaatacttttctacattatagtgcaagaaataattattgataaaagtatattaaactaaattcgtatattttacttattgtacttttatgtaataaaatgcagtgcatttaaaaattgttagattatgtgtgaatttaattttatgttttttaccatgttaagactattgtgcatttaatgaagcattattatgccactaacctatcccaccttactcaaaggtgtaggtaaaagatggtagcaatatactatttggtacataatggaataatgtctctagtaatcactttgccagtggctttaaacagcaaatgaatttaagaatattgttcccataggttaaatttttattctcttttcttactgaaatttattattagtatttgtgagtatatagtatatgtatatatttatgctttatatggcatattttgattcaggcctataatatgtagtaactacattagggtaaataaggtatctatcacctctagcatttatcctttgtattaaaaacagtgtaattatatacttttagttattttaaaatgtacaataaattgttattgactacagggttatttttatgatcataataaaaattatacagaaatataaataaaatacagccaggcccagtggctcatgcctgtaatcccaatactttgggaggacaaggcaggtggattgcctgaggtcaggagttcaagactggcctggccaacgtggtgaaacctcgtctactaaaaatacaaaatatagttgggcattgtggtgcatgtttggaggctgaggcaggagattcacttgtaactgggagctggaggttgcactgagctgagattgcaccacttcactccagcctgggcaacagactcaatctcaagaaaaaaagaaatagaaatcatacatatactgaaaacttattaataaatgtttgttatatggttttctttgaacatgtggtctttgcctgcaaatgtagactttcagtgttaatttacatcagttaaatatacacatattactctgaagataaaccttagatgtaagaaacttatggagtgtgtttgtgtgagcatgagattgtacatattttcagaagaaaagaacaattattggaacaaaacaaattattttaataaggtggctaataaaaaactaagctccttgagaatgctgaaagcaaatctatgctttctgctttgtcttgaatttattaatataaaattttatggcttatgtttcaaatttttttcagaatctgtctattaaagtacaggcagctttgtctccagaaacaacgctcttgagtacaacaataaaagccctcttcaaacagaaaacaaataatcatagttaacacttgttttaatgaaaattcaaccaaaattaaataattagatatatttttattgtcctatgtgtgtgtgaatgtataaaatggtgcataaaggaaaaatatgccagaaaaaaagttaatatttgtaatgaataaaactggaaattagttcattatttgcaggtgatatctttgtttatgtagataacaaaagcagcagaaaactttcacggagtctctctctgttgcccagggtggggtggagtgcagtggtgcgatctcggctcactgcaagctccgcatcccgggttcacgctgttctcctgcctcagccttccgagtagctgggactacaggcgcccgccaccacgcccagctaattttttgtatttttagtagagacggggtttcgccgtgttagccaggatggtcttgatctcctgacctcatgatccacccgccttggcctcccaaagtgctgggattacaggcgtgagccactgcacccggccaaaacctttttttttttttccaaagaattataaatagaagattctaaagagaagtttttaataaataagcatttaaaagaaactagggttacttgttatgtttaaaatatatgctgttctcacacaaaatgaaactgctgaaatccaaatttagaagcaaagaatagacttaaattgttaaacatagaaaatataaatatatactttgaagaacaggattaggcaccttgatacgtgaaagaaaatattaggaaataaactattttattcttcagatacaggctgaagaaagtagatgaaaaccctgtaattcctttttgcctgcagcaaacttaaatttataagtaattattttggtaaatatggagtgcctactaattatgtaatttacttcatgcataacatgcaaattctagcatattgtcataaataaatctaaaattacagacaaatttgaaatagaaaatagtcaaaatgtagagggcgagtgacatcagtaagatgaaagattaaaagttccctaattttatatccccttacagcaaaaaacatcggccatccctgacaaaaatgcctttattggctgggcacagtggctgatgcctttaatcccagcactttgctgagatctgctgagacgggcagatcacgaggtcaggagtttgagaccagcatggcaaacatggtgaaaccctgtctctacaaaaataccaaaaaaataggcagtcatggtggcacacgtctgtaatcctagctactcaggaggctgaggcaggagaattgtttaaacccgggaggcagaggttgcagggaggtgagatggcaccactgcactccagcctgaatgagagagtgtctcagagaaataaataaatgcctttattagaaaaccaggcattatggctcacacttgtaatgacagctacatggtacattaatgatggagaacagcttcaggccaggatttcgagaccagcctgggttatgtagcaagatgtcatctccaaaataagtgcctctatgagagatgtgagatccagggagggagttgtgaaactgttaaagcttaaggttgagaagtgttctattcagaaggcaggccctcattcaggtggaaaactatatgacccctgttctaggctacagaccaggatagggttcacccaacttggtcccactaagaattctgaacttactgtgtaatcatctgaaactcctccagccacagtctggcagaggtcttgccattccagagacctggaggaaggtgcccattcacagccatctaggcaggcctgcagaccttggcctgtacaggggtccctgaagtggttcagtgactcagtttcagttacctgagccacagttcatggccagttcggcctacatagaaagctacagagttacttgaaaaaataatctctggtactcactgaaagccatactcatctacatcctgatacaaggcccaccatatgcagaaccaacttcagaaacattccttatgtctgccctatggagcaaagtcctgaaagatttgcagtctgtccaaaaataaactgggaattacaattacccaagcccctgtaacaagccaactaaagatggaccctagtgcagtcccagcagccttgtgaccaagctgcaacccctcttcactacaaattcagagggtttctcatcatcctaagggaccaacaaaagaagatctttatcttctaaaatcagtgtatgaaaacttgaagaggtgtttgctccatcaacttcagacaccaatacaaaactatactgtgcccattgtcaacacttctattttaatctagcaccggaagtatgtggcagaagaattagtcaaaaaaattttttaatccattgaaattaaagaaaaatgagtaaaaagttgctgtttgcagattatacaattttctatttaaaaaactaagcagtatattaaagcctgtctaataaatgcactcagtaaattagcaaaatataaaagtaacatagaagtatatgtatggtttctttcacttaaaacaaactatctgataaaatacagaaagaggctgggtgcggtggctcatggctgcaataccagcattttgggaggccgaggaaggtggatcatctgatgtcaggagtttgagacaagcgtggccaaaaaggtgaaaccctgtctctactaaaaatataaaaattagctggatgttgtggtgggcaccggcaatctctgctaattggtaggctgaggcaagagaattgcttgaaaccaggaggtggaggttgcagtgagcccagattgtgccactgcattccagcctgggtgacagttggagactccatctcaaaaggaaaaaaaaaaaaaaatagaggaagaaaaaaatcttatttactataacattaaataataaatttctgagaaaaatattaaccaaggaggtaaaaagtctttacaataaaaaaacaaaattagagaagatccaaataaattttaaaatattttatgtctatggattgaaagaataaatattaaagcaccatgttatccaaagtgatctatagattgaagaaacttcttatctaaattgcagttgtattttttcacagtaatggaaaatacaattctaaaatttacatgaaattaaaataaactttgaatagccaaagcaatcatgaggaaaaggaacaaggcagaaggatatcatacttataatttcaaattatatttcaagactatatagtaatgagtggactgtgcagaaaaatgaacagaaaaattcaacagaaataactactctcacacatttcaaatctgatgcgaaaaaaaccttaaaaaatagttttagtttcttaaaatcatgcatatatttgtgagtcccaaaaacaatgaaaaagaagccagattgtgcagtctcttatatgtcatgaagaggaatttggctttcaaatttggcttatatgtcatgaagaggaatttggctttcactcaccccatcgttcctaaccttacaccattcttagcaaaattccatatgatcatcaatggtttacaatgatagatttgaaggatgccttctgggcataccccttgtctgatgatagctgagatatatttgcttttgagtggtaagacccctatttggggcagagacaacaatattgatggacagtcttgccccagggtttcacagactcccccaacctctttgttcaggtcccagaacaagtactagaaaaagtcacagtccctaaacaaatatgtctgcttcagtatgtggatgatcttcttatatctggtaaagacataaaagaggtaggtgacttctctacacacattctcaatcacttgcagtgtgaggggttgctggtctcaaaagggaaaattcagtatgtagaacctgaagctaaatacttaggctacctaattagtgcaggtaaatgaaaaacaggacctgaaagagaattgtttccctacccttgcctcaaactaaacaagaactcaggaaatttttaggactaattggatattgtcatttatggatttgactcatatgcatgaaagagtaaacttctatatgagaaacttgcccagtggaaggctgataatttcttgtggacttcccaagaaatccagcaaattgaggaattgaaagggacactcatagccaccccgttctagctctaccctccctagaaaagccatttcaccttttcattaatgtaaataatggggtagccctaggaatgctaacccaagaacatggaggctgccaacagcccgtggccttcttgtcaaaggtcttagacccactcactcataggtggccccagggtatccaatccattgcagctacagcagtattagtcaaagaaagtaggaaggtaacctttggaggaaagttaacagtaagcctgccccaccaagttagaactatattaaatcagaaagcagggaggtggatcactgactcaataattttaaaatatgaggctattttactggaaaaagatgatttaatattaattgagaatatcatacctagatttagactaatagaaaatattagtctactactactgataattcacttaatccagcaagatttttaacagaggatccaaacttaaaacgagagcatgtatgtttagatctgattgactaccatacaaaagttcgaccagacttaggagaaactcccttcaagacaggttggcacttattcatagatgggtcttcccaggtgattgagaggaaaagacataacaggtattcagtgattgatggagagacgcttgaagaagtagaatcaggaaggctgcctaatgattggtctgcccaaacatgtgaactgtttgcactcagccaagctttaggacatttacaaagccaagggtatactgactgtaagtatgcctttgccaggaaggaactatctatactgactgtaagtatgcctttggggtggcacacacatttgggaaaatttggatgaagaggttcttatcaatagtagaggccaagatttagttcatagctaattgcttgtgtcctcaacaatctccaattgccagaagagatagctatcgtgcatgtcgcagggcaccaaagggactttggtgtctgtagttctctaatatcacatccctatataaattccactgtgcagtgtccaggcaatgccattcctccagagagaattctatggccacatctctaaattgcaatggttcctgaaacacacacacacacacacacacacacacacacacacacacacacacatttttaccaagttgccattggtggaatttttaatttgatttaaggtgaaatgagagagtaaagggaagtgattctgacttacaggactaaaattatccaataaaataattttcaacacagaaatattctctaatatattctctaactctaagaaaaaaagaggagcataacatccacaacatcatttcatatatttttccatataataaagtataaaattaagggcatgaacatgaacatgtacatttttgagtgctatatttacatcatacagaatgagttgtgaatatttttccgatggaaaagacatgttgagttagaaggtatctctcaaattttgttttgagatggaatttcaatctagttgcctaggctgaagtgcagtgatgtgatcttggctcaccacaacctctgcctcccgggttcaagcaaatctcctgccacagcctcccgagtagctgagattacaggcatgcaccaacatccctggataattttgtatttttagtagagatggggttttctctatgttggccaggctggtcttgatttcccgaactcacgtgatctgcccgcctcagcctcccaaagtgctgggattacaggcatgagccactgcacttggctgatttttttaatttctaagaagctcaccagtaatgccaatgtttttggcccaagaaggatattttgtcaaacatccagtaagtggaagagcctgtgtttttcccagattttttagcctgtaagcaaagataaaagccttcattttccaaagagagatatgtagaaaaaaataagaaaaaaggacagctgccagattaaatgtgatggtttatgcacatcagctgcataaacatacttaataatgaagagaaaaataattaaccctatggtgaaaaaaatctgtcagagagctaattcaccaagtgaatcattaaccattaactgcacgaggacaaatttttacgatgtgctaatgcacacaggagaacacagaatcactgttgaaatatacttccccaaaaaactaaattacagtctgaatttaaccataaagaaacatgagttttatgcaaacttcaacatccagataactcctatgttctgtaatttttactagtaattttaaatagggttcatttagcaccctagaaaacaagtatctcctgataagttttttcagaactttctgggtaataaatgccatcccattttaatgagcattttcttaatcctgttctgcatagagctaatggaacacacagatggagcctcaacattacatgttctccatctttactaaggaccacacttttccccaatagaaatcttcagtatccacatctttccatgttcaatagccacaaaaggaacatttttaatattgcagatcataaatccttgctgagaatcctgcgtgacatataagaagctatgatgtagagaatgcagagatggctctggaatataggaaagaaatatttttcagagacccttgactatcataagaattttaacaagtagttaaatcaaacttattagggaggaaaaatacaagtagaaaaataaaggtttgcaagtactaaacgcatggcagtccaggaggcagagtggacacaggtcttcatctgacacaggtttacctgaagaaaagcctttttttttctttttccccttctctggaattccttctcagatgagattttctggacaaattaaacctgcatctgaaggatatgcttttaaaggtgtttacctgctagcatgacatcaactagcagaaaaagacagaaaaagtccacccatttctgtcctttaaaacagaagaggttcaggaaaaatgagatgctccatgaagatgaaagtataagtttctcctttcctgtcctcaggtgccctcccctgccacagacactagcaatttctgctaccttaatggaaatatgcaccacactgacctgtccctactaaacccaaacagaactggccctgtgaccaccctttagtccaaaggtggagcttaactctcatgaatgtattttgagggcctcatacctgattctggcctaaccttagagtcacatgaggcccttcattaaaacgtgatagatgcttccaccgagaatgataaacagaagctgtggggagggcacaagagatttctgcaaattggccatttgatcctaatgggaagcctgggctgataaccactaagttaagcattgcctctcaagctttaatgagattataaatcacctggtaattttggccccacttaatgtaatgtgattctgcaggtttgaaaagggtccaagagtgagtgttttaaacaagtcccctgtcaatgcagttgtttctcccccttggagaattattaacattagagaaagcaggcacagcacagggtcccttacacttagcactcttgtcaccaccaaatacttctggtacaaataaggacaacccatctccctcctaaagttttatagtctttgctggctctttagagtttacagaggaaacaaaagtcagcaatgtctgaataagtctgtatttaaaaaacaacatgtaaacatgtactaatgcaatgtttattaagcaggtactatgtgctcaagggtaagatacagagcactgtgctggtcatccctcattatgtaatttaattctcataacaccctgggagctggtactaagggtttaataatttttaggatttagataaagggcccagcatttttatttcttctgtttctctgtcatcaaattttttaaaaaactgtaaatagtaaagctaaatataggcagatgaaagagatatagaaaggaagagtttaatgtagctcagagaaaattttattctgtttatattcacttttttgtgacttgtggagcaactactggatctgcaggaatagaaaacaagttgctaaagagaatgtctctgcaaccactggttttaatggaaaatttaaaaactggccgggtgcagtggctcacgcctgtaatcccagcactttgggaggccaaggcaggtggatcacctgaggtcgggagttcaagaccagcctgaccaacatggagaaaccccatctctactaaaaatacaaaattagccaggcatggtggtgcatgcctgtaatcccagctactcaagaggctgaggcaggagaatcgctggaacctgggaggtggaggatgcagtgagccgagatcgtgccactgcactccaacctgggcaacaagagcaaaacttcatctcaagaaataaataaataaataagtaaaatttaaaaactaaggctctacaatatatactttatttttcccatttatctgcttttgggtttcaggaaattgtgagtagcagctctagaactgctgcaggattcatcagccaaaattctgataacttctaatcagttctgtgaggcaagactccagggcagggtcagacctaaataaggcctccaaaaagggtgaatctgaacaggtctgggacaaggtgaggaccctatagaattctgttctctatgccactggagtactaacaattttgttttttctaagcttgcctgaaagaagcctaaaatcccagagtttctgttattttcattttttctagccactaccctgtcaactgtatactatatactaatatgcaaattaaacaaatctcttcaggttttgtagtgtaattttattagaaaataaatactgtgcacttaacaacataaaagaaatagattttatatggccgggtgctgtggctcatgcccataatcccagcactttgggtggccgaggcgggtggaacacgaggtcaggagtttgagaccagcctgataaaggtggtgaaaccacgtctccactaaaaatacaaaaattaaccaggtgcagtggcaggcccctgtaatcctagctacttgagggactgaggcaggagaatcacttgaacctgggtggcagaggttgcagtgagccaaggttgcaccactgcactccagccttggtgacagagtaagactccatctcaaaaataaaaaagaaattataataacaatttttctgttcataaatatcccttcaggtgtagacatgagaagttacaacaatataaagaaatagcctaaataaagcctaagattttgggcatatctatttattgtaccaaccatatgatgcataattcaattatttatctgggtgctagtctagactaaaagtttctagatggtaggaaccatgactgcttcatggatttttttaaatggccatatgaaatggaagcaactagtttatctatttgggtctccggattttctccttttgtatcatccaagtaccaggaaaccggagaaactctcatctgggtaccaaccaaagacacctcttgtatgaggggatgaactaacaggatgactcatttctctcacactgagacagaaggagaattaaccattcttgtcagcctgacataattccgctcaggacatcctcaaatgcctcaaaggcacctagatgattgtgagagaattctcggtgaccaggggctaatgtcccaatgataaaccaggctggagagactcaggctgattctaaatagaaaatggaactgtcctggtggagctccagaacctagatcacctattctaatttgctagctccatggtataaaatatttttttggaacttcttaaattttttcaactcttggacatctgaattttgcatactgtatgcacttgaaagaatgtttatgggtgaaaatgcagaagagggaaatatgttataaaaaatccatgaatgaacaatacctatgcaacagaatagagagcccagaaataatgccaccctcctacaacgattagatttttgccaaagctgacaagaggaatgtgggaagaattctctatttcataaatggagttggaataactacctagcactatgcagaagactgaaactggacctcttcattacaccatatacaaaactcaactcaaaataaattaaagacttaaatgtaaaatttaaaattataagacaccctgcaagataacctaagaaataccattctagacatagaaactgggaaaaccttcatgatgagtctatcaaaagcaattgccacaaaagcaaaaatggacaaaagggacctatttaaactaaagagcttcttcacagcaaaggaaactatcaacagagtaaacagacaacatacagaataaagaaaatatttgcaaacattgcctctgacagaggactaatatccagaatttattaagagctcaaacaagtttacaagaaaaaaaacaaataacctcattaaaagtagaaaagaaaaacatgaacatattcttttcaaaagaagacaaatgtgcagttaacaagcatgtgaaaaaaatgctcattgctaattattagagaaattaaaagaaaaaccacaatgagataccgcatcacacccatcagaatggctatttttaaaaagtcaaaaaataatagatgctggcaaggttgcagagaaaagggaatgcttatactctgctggtgagagtgtaaattagttcaacaactgtaaaaagcagtgtggcgattcctcacagaactagaaacagaattatcatttgacccagcaacctcataattgggtatatacccaaagaaatataaattattatattacaaagacacatctatatgcatgttcactgtagcactattcacaatagcaaagacacggacaggcactaaatgcctaccaatgatagactagataaagaaaatatggtatggtcagatgttgtggctcatgcctataatcccagcactttgggaggccatggcaggtgggttgcctgagcttagaagtttgagaccagcctgggcaacaagacaaaatcttgtctccccggaaaaaaaaaatatataaaattgcccagttatggtaatgcacgtatgtagtcccagctacaagggaagatgaggtaggagagaattgcttgagcctgggagattgtggctaaagtaagccaatatcatgccctggcactgtagcctaggcaataagcctgtctccaaaaataaaataaaataaaagatttagtaaaaacaaaatatggtatataaacattacaaaatactgggtagctatttaaaaaaaatcatgtcctttgcaataacatagatgaatctggagaccattattcttagaaaatgaatgcagaggctggacatggtggctcatgcctgtaatgctaacactttgggaggccgaggtgggcgaaccacctgaggttgggagtttgagactagcctgaccaacatggattaaccctgtctctactaaaaatacaaaattagctaggcatggtggtgcctgcctgtaaccccagctactggggaggctgaggcaggagaaccgcttgaacccaggatacgaatgttttgatgagccaagatgttaccatggctctccagcctggacaacaagagcaaaactccctttcaaaacaaacaaacaaaaaaacaacaaaaaaagaaaactaatgcggaaacacaaaaccaaatgcatgttataatttataaataagagctaagaagtaagaacacagaacacaaagagaagaacagacacaggcctagttgaggctggagggtagaaggactcagaagatcagaaaacataattgtttggtgctatgggtagtacctcagtgacaaaataatcggcacaccaaatccccatgacataattttagctgtataacaaacccacatgtgtacccggaaccaaaaataaaagctaaaagaaaaacaaatcccctctccctctccctccgcctccccctccctctccctctccgtctccgtctccctctccccagggtctccctctccctctctttccacggtctccctctgatgccgagccgaagctggactgtactgctgccatctcagctcactgcagcctccctgcctgattctcctgcctcagcctgccgagtgcctgtgattgcaggcgcgcgccgccacgcctgactggttttcgtgtttttttggtggagacggggtttcgctgtgttggccgggccggtctccagcccctaaccgcgagtgatccgccagcctcggcctcccgaggtgccgggattgcagacggagtctggttcactcagtgctcaatggtgcccaggctggagtgcagtggcgtgatcttggctcgctacaacctccacctcccagccgcctgccttggcttcccaaaatgccgagattgcagcctctgcccggtcgccaccccatctgggaagtgaggagcgtctctgcctggccgcccatcatctgggatgtgaggagcccttctgcctggctgcccagtctggaaagtgaggagcgtctctgcctggccaccatcccatctaggaagtgaggagcgcctcttcccggccgccatcacatctgggaagtgaggagcgtctctgcctggccacccatcgtctgagatgtggggagcgcctctgccccaccgccctgtctgggaagtgaggagcgtctccgcccggcagccaccccgtccgggagggaggtggggggggtcagccccccgcccggccagccgccccatccgggagggaggtgggggtcagccccccgcccggccagccgccccgtccgggagggaggtggggggggtcagcccccagcccggccagccaccccgtccgggaggtgaggggcgcctctgccaggccaccaccccgtctgggaggtgtacccaacagctcattgagaacgggccatgatgacaatggcggttttgtggaatagaaaggggggaaaggtgaggaaaagattgagaaatcggatggttgccgtgtctgtgtagaaagaagtatacatgggagacttcattttgatctgtactaagaaaaattcttctgccttgggattctgttgatctcttgaccttacccccaaccctgtgctctctgaaacatgtgctgtgtccactcagggttaaatggattaagggtggtgcaagatgtgctttgttaaacagatgcttgaaggcagcatgctcgttaagagtcatcaccactccctaatctcaagtacccagggacacaaacactgcggaaggccgcagggtcctctgcctaggaaaaccagagacctttgttcacttgtttatctgctgaccttccctccactattgtcctatgaccctgccaaatccccctctgcgagaaacacccaagaatgatcaataaaaaaaataaattaaaaaaaaaaagaaaaaaaatccccaggtgagagagagtgcaatgtcagtgaatggacagatttttgctacagatagttgaccaggtggggctgtactctgatttatttctgtgtgcatgcaggcagatgagattatgaaaaggagggccagaaccctaggctggtggagaaaacaggttgctgctgcagattcgatatccggggatgggaatatgcaaggaaacttgtagatacttttggctttttggctagaagtgcttggaccaaaaatgtcatggtgaagtcactgagggtggtgcctagtcctgggaggagtgtggacatgtcaatgtctagtgtgtgtgtttgggagtatgtgggaatcctgtggtggcagctgcaagaaaaggggatgtgtcatcagagctcctttcctgtaagttttcagtcctctgtcaccctgggagaagacctggaatcacaggacaatgggcagtgtgacaatctgtgtacaggagagcagaatctcccattcccaaacacccagagttttattccaggccaggcctccatgatatcttctttctggcaccaaatctgtagcatttgctgaacatcaaacaattctccaacaccaacttattgtataacatttgatttctaacactacccagagtcagcacagaccctgattcagggctcggtcccacaacattgttctcactgcagatgccagtcataaatcccatgggcccatctatggttctgagctactgtttaaaaactggggactcccataacttccctgaagctcagtaatttggtagagctactcacagaactcagcaaaacactgtagttatgcttactggtttaatatataagatgcagcccaggaaaagccaagtggaagaaatgcatagaacaaagaaaagagatgaggaaagatgaaacacatagataattatgaaaaatatttgtgattaataaaattctccttcctttgtgtgcttcaggaacagtttatggaaagaaacactcttcccgttatgattaagatgatgctcccttttcttgcctatcacacagccagacatacactctgcacattttctcctttttctcattaaaaaaaaaacaaaaaaccagctgaatttgccttcagcagtcaaaatcaattatgattttttttttttttgagatggagtgtcactctgtcacccaggctggagtgtagtggggccatctcggctcacttcagctttcacctccagggctcaagcaattttcctacctcagcctcccaagtatctgggattacaggcacctgccacaacgcccagctaatttttgtatttttagtagacagggtttcaccatgttggccaggctggtcttgaactcctgacctctggtgatccgcctgcctcagcctcccaaagtgctgggattgcagacttgagccaccacacccagcctaaaataaaatatttcttaatcaaattttacttaagtttatcttctctcaggctcctgaaattcaagctaccctcagtctgagtcaacatacaaccccattttatgtccctcctaagaacatgctgatttcagggtaagccattctctgatctaaaatctgactttttcaccctccatttgctgttcctctcccacctcctttctaatcttgtttgctcttccctagaaaagaaagcccttttctgcctatatttttgcaagccataaagatattatagttatttggtgcttccttttgttgcaatacttttttggaattggttttttacctgcctcttgagaatatgcctttaagggtgtcagtaccacatgtttacctgcaagcatgacatcaactggcagaaaagacagaaaaagtccatccatttctgtcccttaaagcagaaggtatttgggaacaatgtgctgctccataaagataaaaatatgtttcttcttccctgtcctcaggtgccctcccctgccacagacaccagcaatttctgctacagaacctgcagagaaaaagagaagaaattaaaatgctgggccctttttctaaatcctggaaattagtattaaatccttagtaccagctcccagggtgttatgaggattaaattatataatgtattatgcccagcagagttctctgtatcacaatcttgagcacatagtacctgcttcatacagtaatacaaatatacaccactctgacctgtccataccaagccaaaacagaacaggccctgtggctaccctttagtccaaaagtggaacttaattctcatgaatatattttgaaggcctcatacctgattctggcctcaccttagagtcacatgaggcccttcattaaaacaacatggatgttttcaaccagaataataaacagaagctgtggtgagggtacaagagatttctgcatattggccatgtgatcctaatgagaagcctgggctgataaccactaagctaagcattgcctctcaagctttaatgagcttataattcacttggtaattctggccacactttaagtaatgtgattctgcaggtttgaaaagggtctgtgaatcagtgttttaaacaagtcccctgtcaatgctgatgttactcctccttggctcattattaacattagttagaaaagcaggcaaaccacagggtcccttacacttagcactgttgtcacaatcagataactctggtacaaataaggacaactcatctccatcctaaagttttatattctttgctggctctttaaagtttacagaagaaacagaaggtaattaccaggatttagaaaaagagccaagcattttaatttcttgtttttctgtcatcaaaaatttttaaaaattgtatagaataaaagctaagtatagacagatgaatgagacataaaaaggaagaggttagtttagagaaaattttattctgtttgtatttacttttttttgacttacggagcaactactggatctgcgggaataagaaacaagttgctaaatagaatgtctctgcatccaatggttttcatagaaaattaaaaaacggctgggtgcggtggctcatgcttgtaatcccagcactttgggaggcagaggcgggcggatcacgaggtcaggagatcgagaccatcctggctaacgtggtgaaaccccatctctactaaaaatacaaaaaattagctgggcgtggtggcgagcgcctgtagtcccagctactcggaggttgaggcaggagaatggcatgaacccgggaggcagagcttgcagtgagccgagatcgcgccactgcactccagcctgggcaacggagtgagactccgtctcaaaaaaaaaaaaaaaaaaaaagaaaatttaaaaatgaagaccctcaaatacatactttatttttttgtatttatctgcttttggatttcaggaaattgtgagcagcagctctagaaatactgcaggattcaccagccaaaactgatctctgccaatcagttctgtgaggcaagactccagggtaggtctggacctacataaagcctccaaaaaaggtgaatctgaacaggtctggggcagagtgaggatcctttgtagaattctgttctctatgccactgggatacttccagttttgtttttctaagcctacctaaaagaaacttaaatcccagagtttctgtaattttaatattttctagccacggccctgtcaactttatactatatactaatatgcaatttaaagaaatcccttcaggtttcctagggtaattttattggaaaataaatatgtacagttagcaaggtaaaagaaatagaaactatacggctgggtgcagtggctaagtcccacaattccagcactttgaaaggctgaggtgggtggatcatgagggcaggagttcaagaccagcctgaccaagatggtgaaaccttgcctctactaaaaatacaaaaattagctgggcatcgtggctgtggccagtaatctcagctacttgggaggctgaggcaggagaatggcttgaacccgagtggcagaaattacagtaagccaagatcgtgccactgcactccagcctggggaactgagattctgtctaaaaaaaaaacaacaaaactataataattgttcggttcataaatatattcaggtgtagatatcagaagtcacaacagcataaagtggcataaataaagcccaagactttggacacatctatatattccaccaaccatatgatgcataattcaattattcatgaagttgctagtctagactaaaagtttctggattgtaggaacaatgactgcttcatgtatttttttaatggccatataaaatggaagtaatgagtttatctatttgggtctccaggtctccttatttatcatccaagtaccagaaaactggataaactctcatctgagtaccaaccaaagatacctcttgtatgagaggatgaacaaaaacacaggatgactgatttctcttacaccgagacagaagcagaattaatcactcttgtcaacctgacacaactctgctctggatattcccaaatgcctcaaagacacctaggtgattgtgagagaattcccagtgaccatgggctgatgtctcaataagccaggctggagagactcaatgataagccaggctggagagactcaatgataagccaggctggagagactcaggctgactctaagtagaaaatggaactgccttggtggagctcaagaacctggatcacccattctgatttgctagcatttgggtaagagaaagaatgaaaatattctactccagtatcacattttacaggtaaatatagttgtgcacatggctctggctattttgtggacttgatgtctcactcctaagatgtttatttacacttacagattctaccatcagattctatttcctcctggacactcttacagtctgacccttttttgtaaaccccaggcagaagccataccttatctgcagattctaggtaggacccacctggttctgcatcctttggtgttacagcaagtggagtacaatcagagaagagatcccctaatagaggctgctctagcactttctaagtattaagcctacatgaaaaaaaaaaaaaagctgacacaacatgaatgtaagtagacagtttatttgggtgaagtttaaggattataacctgggagcaaagactgaagttgcctagaatctacactttcattaacagcagttgcaagaggagttgtgaagacaaaaacaaagggacagagagtgggctgatagagttgtcagaaatttttatttaaagaagtaacattggttattgattggacatatatcattatggtttagggtatgagatacagtgtccaatgtggtattatcagtttaatatacatctacttgtggcaatagtgaacagtttcaagagatgaatacatatttcaaaggaggagaaaggcgtaactgcactttcatttcaatgtctgagtttgataaccaaaaggacttgcatttttagataaaaattttctatttcccaaatctcaagacctagatacaaaatgtagagctgcagatttagggcccgaatggctggagtagcagcaggtgttacctgcacatttgtgaacattttaccaagagaaaaaaggggaaagtgaagattctcatgtctgaatgtgtactcaatgaaaacgttactctgattaggtttgtgggccccatggtctctgaatcagtttaaggtctgaagatacaagagtcattgagataaaactattgattgttgccctgtgaagttggtagaaatttggtttagtctctctagaagtgactgtagaggactatagataccaaataggcagaaacacagttctgcttgcatatttaggggacagcatgcactttgttgcacaagtgtgagttgactggaagtctgagagggaaagtcccctctagagtaaattccagttggcaccttatgtgtttatatcatgtctggtaattatagacagtgtttggaaataacaaaagaatgttctccagccccagaaaaactccacaatagaacagaaagaaaactgttttatgtgacatgcatcatagtcaatctgcttaagagactgcagagacagaaagatggtcaccaaaattagtccacaagtagaatttccagaaccatgtcatacatagttcatcctaaattcacatggagattgaagaggccatctgtatatgctaattgtttatattcaataacaaaaaaacttttcacaccttcataacaggaggtagtttagcagcttgaagccaggtacttgctgaaggtaggttttcactctgctacaaaaatggttgaaaagcattctatccttttggctatttacattttacagcagtggctctgtgttccatggcattgggctacagcactttcttgctttttcctggttgctagtgtcctcttgacctctctcatctgccactgagggacagccttgagcacagctcagtttatgtgaaccacatttcccacagcagcactctagtgtcacatcagagaggaaagcctgagctgcaggagagcctgcaggccttgtgagtagaattgcactttcacaataatgggaatgtgaccagtgtttcagcccgtttttaattatcatggtgacatggaaaaaaaatcggatgaatttccagcatgagtccagatagagatatctacaaaagttctcactgtgacagcctacctcattcagacaccatgggatactaatagggcttctgaaacagacacccaaagtattggagagaaaaacagatctccatctgagcaagataattttgagagaaaaaagttaaaaagatcttgagaaaaaagatcttgagaaaaagctcagtttagatataagattgatcaagtcagccagaaaatagtcccctaaaagcaatttctctctaaccacccaaagtgcacaattactctcagcatgagaaacatgagcattatgaagaaagggggcagaatttcagaagaattttataaagctttttttcccatctctgctgctctctcatctcctagtcattgaatgggggttctatattgaaatatatctgacaacttccaacaacactttttgatgcagaaatagaatctgactgtgttcacattgtggagtatattagaacttccaacatagttaactgaagagctatcatggtttttgggtggccacatcaactgtctttatttcatttgtaatagcagcattccaattgagtgaaataaaagatactaaaattgtgtttacttataattatccctattgaataaagtaataaacatgtcagactagtattgactgtaacaatttggtagtaaattttttggggtattagattaaatatctaagtataaataattttaataaactagtagtaatgtatatggcagttaaaaagtttaactatacttcagttaaaatagtttatatttcaaaagtgtaaataacaatattaaaataaccatttaagtgattcattcaaagtaagtattgtggctttatattcatactattgtaaaaaatactgtttatggctcatgcctataatcccagcactttgggagactgaggtgtgtggatcacctgaggtcaagagttcacaatcaagctggccaacacggtgataccccatctctactaaaaatacaaaaacttagccaggcatggtggggtgtgcctgtaatcccagctactcaggaggctgaggcaggagaaatcacttgagcctgggtcccagtggttgcagtgagcagaacacgcccctacactccagcctgggcaagagtgagactctgtctcaaagaaaaattaaaaaaaaagaaaaagaaaactgtttaatgtatatgaatgtattgttatgtgtagtgtctgcaaacactacacataactatgctaattgttctgaagtcatcaatagaaagccaagtacaactacagactctactgttcagtttatgcactgaactctttttgtttttgctgtgtaagtacttcagcctgcaaatgttggataattaccttggataataaagttactttcaaagaaacttagtatcttttagcgtttctcattccatattgctaaatttaatcctatgtttctgctaagcttctgtgtgctcttaaaatgagcttttatctaaacacatttgtgtttactttaaaggactaaaaatgggccaggcatggtggttcatgcctgtaatcccagcactttgggaggctgaggcgggcagatcacttgagtttgggaatttgagaccagcctgaggaatatggagaaaccccgtttctactaaaaaaacaaaattagttgggtatggtggcacgtgactgtaatcccaactactcgggaggctgaggccagagaatcccttgaacctgggaggtggaggttttggtgagtcaagatcatgccattgcactccagcctgggcaacaaaactgaaactccatccaaaaaaaaaaaaagtcctaaaaaggagagaaacaaactttttaaaattagaaataaaccaataaatcagatgtactagaaaagataatctaaagtaaaaaaaaaaaaaaaaaaaaagacaaagtttatttaactgttaatatggtttacagatatttcaagaaagcagagaaaaatatctacacataatctaaatcccttaaggaaaaagagaataagaaaaatttttttggaactttttaaaaagtctttgaactcttggtaatctaagttttgcaaacaggatgcacttgaaagaatgttagcctaggtgtggtggctaacacctgtaatcccagcactttgggaggttgaggcaagcagatcacctgaggttgggagttggagaccagcctgaccagcaaggagaaaccctgtctctactaaaaatacaaaattggctgggcatgatagcatatgcctgtaatctcaactacatgggaggctgaggcaggagaattgcttcaactcaggaggtggaggttgtggtgagccaagatcatgccattgcacttcagcctggcaatagcgaaactccctctccaaaaaaaaaaaaaaaaaatgtttatggggggaaaagcagaagagagaaagatgttataaaaaattcatgtgcacaagaccaatgcaacagaacagagagcccagaaataatgccaccctcttgcaaccatcagatttttgacaaagctgacaaaagaaatgtggggaaaattctctatttaataaatggtgccggaataactaactagtaatatgtagaacacttaaactgaaccccttaattacaccacatacaaaaatcaactcaagaaaaattaaagacttaaatgtaaaacataaaattataagaaaccctgcaagataacataaaagctaccattctagacatagaaacctgcaaacacttcatgatgaagctaccaaaagcaattgcaacaaaagcaaaagctgacaaatgggacctatttaaactaaagagattcttcacagcaaaggaaactatcaacagagtaagcagacaacctacagaataaaagaaaatatttgcaaactttgcctctgacaaaggtctaatatccagaattaatgagaacttaaacaagtttacaagaaaaaaccaaacctcattaaaaagtgggcaaaaaacatgaacagatgcttttcaaaggaagacatacatgtggctaacaagcatatgaaaaacaaagctcaatggtaatcattaaagaaattaaaaagaagccaggcacggtgtctcacacctgtaatcccagcacattgggaggcttaagcaggcagatcacaaggtgaggagttcaagaccagcctgtccaatatggtgaaaccttgtctctaataaaaaaacaaaaattagcctggcatggtggtgggcacctgtagtcccagctagtcaggaggctgatagaggagaatcacttaaacctgggaggtggaggttgcaatgagctgagatcgtgccactgctctccagcctgggtgacagagccaggctccatctcaaaaaaataaacaaataaattaaaagaaaaaccacaatgagataccacttcacatcagtcagaatggctattttaaaaaagtcaaaaaataacagatgctaccaaggttgcagagaaaagagaatgcttatactctgctggtgggagtgtaaattagtttaactgtaaaaagcagtgtggcaattcctcacagaactgaaaacagaattatcatttgactcaggaacctgataattgggtatataccaaaagaaatataaattattataaagacgcatccatatgcatgctatgcatgttcattgcagcactattcacagtagcaaagacatggacaggacctaaatgcccatcaataaagaaaatatggtatggtcagaagcggtggctcatgccttcaatcctagagctttggaaggccaaggcaggtggactgcctgagcttagaagtttgaaaccagcctgaaaaaaatagcaaaatcttgtctacatggaaaatacaaaaagaaaaagtggccagccatagtaacgcacacgtgtagtcccagctacttgagaagatgaggtaagggagaattgcttgagcctgggaggctgagactaaagtaagccaaaatcacaccatggtaatctagcctgggcaataagtgagaccctgcatccaaagataaaataaaataaaagatgtagtaaaaaacaaaatatggcacataatcatggaatactccatggccattaaaaaaaatcatgtcctctgcaataacatcaatgaaacccattaaaaaaaatcagctctgatcttagttttttcttgccttctgctagcttttgaatgtgtttgctcttgcgtctctagttcttttaattgtgatgttagggtgtcaattttagatctttcctgctttctcttgtggacatttagtgctatatatttccctctacatactgctttaaatgtgtcccagagattctggttatgttctgtctttgttctcattggtttcaaagaacatctttatttctgccttcatttcattatgtacccagtagtcattcaggagcaggttgttcagtttccatgtagttgagcagttttgagtgagtttcttaatcctgagttctagtttgattgcactgtggtctgagagatagtttgttatactttctgttcttttacacttgctgaggagtgctttacttccaattatgtggtcaattttggagtaagtgcaatgtggtgctgagaatgtatattctgttgattttgggtggagagttctgtagatgtctattaggtctggctggtgcagagctgagttcaattcctggatatccttgttaactttctgtctcattgatctgtctaatgttgacagtggggtgttaaagtctcccattatcattgtgtgcgagtcttagtctctttgtaggtctctaagggctttctttattaatctgggtgctcctgtattgggtgcatatatatttagtatagttagctcttcttgttgaattgatgcctttaccattatgtcatggccttctttgtcttttatgatctttgttggtttaaagtcttgtttttctcagagactaggattgcaacccctgctttttttttttgttttccatttgcttcagagaccttcctccgtccctttattttcagcctatgtgtgtctctgcacatgagatggatctcctgaatacagcacactggtgggtcttgactctttttttttttttgagatgggtctctgttgcccaggctggagtacagaggcatgatcttggctcactgcaagctctgcctcccaggttcatgccattctcctgcctcagcctcccaagtgcctgggactacaggtgcctgccaccatgcctggctaattttttgtatttttactagagatggggtttcactgtgttagccaggatagtctcgatctcctgacctcgtgatctgcccacttcagcctcacaaagtggtgggattacaggtgtgagccactgcacctgccagggtctgggccctttatccaatttgccagtctgtgtcttttaattggagcatttagcccatttacatttaaggttaatattgttatgtgtgaatttggtcctgtcattatgttagctagttattttacttgttagttgatgcagtttcttcctaacattgatggtgtttacgatttggcatgtttttgcagtgactggtaccagttgttcctctccatgtttagtgcttccttcaggagctcttgtaaggcaggcctggtggtgacaaaatctctcaggatttgtttgtccgtaaaggattttatttctccttcactgatgaagcttaggttggctggatatgaaattctgggttgaaaattcttttctttaagaatgttgaatattggcccccactctcttctagcttgtagagtttctgccgagagatccactgttagtctgatgggcttccctttgtgggtaacccgacctttctctctggctgcccttaacattttttccttcatttcaactttggtgaatctgacaattatgtgtcttggagttgctcttctcgaagagtatctttgtggcgttctctgtatttcctgaatttgaatgtcggcctgccttgctaggttggggaagttctcctggataatatcctgcagagtgttttccaacttggttctattctccccatcactttcaggtacaccaatcagacgtagatttggtcttttcacatagtcccatatttcttggaggctttgttcatttctttttattattttatctctaaacttctcttcttgcttcatttcattcattttaacaatcactgatactttttcttcctgttgatcacattggatactcaagcttctgcattcatcacgtagtttttgggccatggttttcagctctatcaggtcatttaaggtcttctctacactgtctattatagttagccattcatctaatcttttttcaaggtttccagcttctttatgatggattcgaacatcctcctttagcttggagaagtttgtttttactgattgtctgaagaactgaaggagagagagagacacaaaagaaccttcaaaaaaaatcaatgaatccaggagctggtttcttgaaaagatcaacaaaagtaatagactgctagccaaagtaataagaaaagagagaagaatcaaatagacgcaataaaaaatgataaaggggatatcaccactgatcccacagaaatacaaactaccatcagagaatgaatactataaacatctctacacaaataaactagaaaatctagaagaaatggataaattcctggacacataccccctcccaagactaaacaaggaagaagttgaatccctgaatagaccaataacaggctctgaaactgaggatataattaatagcccaccaaccaaaaaaagtccaggaccagacagattcacagctgaattctaccagaggtacaaagaggagctggtaccattccttctgaaactatttcaatcaatagagaaagaaggaatcctcccaaactcattttatgaggccagcatcatcctgattccaaagcctggcagagacacaacaaaaaaagagaattttagaccaatatccctcatgaacattgatgcaaaaatcctcaataaaatattggcaaactgaatccagcagcgcatcaaaaagcttatccaccatgatcaagttggctttatccctgggatgcaaggctggttcaacatacgcaaatcaataaacgtaatccatcatgtaaacagaaccaaagacaaaaaccacatgattatcaatagatgcagaaaaggcctttgacaaaattcaacagcacttcatgctaaaaactctcaaactaggtattgatgggacgtatctcaaaataataagagctacaaaccactgctcaatgaaataaaagaggacacaaacaaatggaagaacattccatgcttatggataggaagaatcaatatcatgaaaatggccatactcctcaaggtaatttatagattcaatgccatccccatcaagctaccaatgactttcttcacagaattggaaaaaactactttaaagttcatatggaaccaaaacagagcccatattgccaagacaatcctaagccaaaagaacaaagctggaggcatcaccatatttgacttcaaactatactacaaggctacagtaatcaaaacagcctggtgttggtaccaaaagagatatagaccaatggaacagaacagagccctcagaaataataccacacatctacaactatctgatctttgacaaacctgacaaaaacaagaaatggggaaaggattcccgatttaataaatggtgctgggaaaactagatagccatatgtagaaagctggaactggatcccttccttacaccttatacaaaaattaattcaagatggattaaagacttaaatgttagacctaaaaccataaaaaccctagaagaaaatctaggcaataccattcaggacataggcatggacaaggacttcatgactaaaacaccaaaagcaatggcaacaaaagccaaaattgacaaatgggatctaattaaactcaagagcttctgcacagcaaaagaaactaccatcagagtgaacaggtaacctacagaatgggagaaaatttttacaatctacccatctgacaaagggctaatatccagaatctacagagaacttaaacagatttacaagaaaaaatcaaacaaccctaacaaaaagtcggcaaaggatatgaacagacacttctcaaaagaagacatttatgcagccaacagacacaagaaaaaatgctcatcatcactagccatcagagaaatgcaaatcaaaaccacaatgagataccatctcacaccagttagaatggctatcattaaaaagtcaggaaacaacaggtgctggagaggatgtggagaactaggaacacttttacactgtttgtgggactgtaaactagttcaaacattgtggaagacagtgtggtgattccccaaggatctagaactagaaataccatttgacccagccattccattactgagtatatacccaaaggattataaatcatgctgctataaagacacatgcacacgtatgtttattgtggcactattcacaatagcaaagacttggaaccaacccaagtgtccatcaatgatagacaggattaagaaaatgtggcacatatacactatgcagccataaaaaaggatgagttcgtgtcctttgtagggacatgaatgaagctagaaaccatcattctgagcaaactatcacaaggacagaaaaccacatgttctcactcataggtgggaattgaacaatgagaacacttggacacagggtggggaacatcacacaccccggcctgtcatgggtgtgtgatggagcagagagggatagaattaggatatacctcatatgaataatgagttaatgggtgcagcacaccaacatggcacatgtatacatatgtaacaaaccagcatgttgtgcacatgcacctagaacttaaagtataataataataataaaaaattaataagtaaaaaaaaaatgaggtctttgcaataacatcaaggcacggtggctcacgcctgtaatcccagcactttggaagaatgagatgggtggatcacctaaggttgggagtttcagaccatcctgaccaacatggagaaaccaaatctctactaaaaatacaaaattagccaggcgttgtggtgcgtacctgtaatcccagctactcggaaggctgaggcaggagaatcccttgaacctaagaggtggaagttgtggttagcggagatcacgctgttgcactcaagcctgggcaacaagagtgaaactctgtctcaaaaaacaaaaacaaaaacaaaaaacaaaccaaaccaaaaagaaaactaatgaagaaaaagaaaaccaaatgcttgttattatttataagaggtaaataataataacacatgaacacaaacaacagacactgaggactagtttagggtggaccctgcaaggactcagaggatcagaaaacatacctgtttggtgctatgggtagtacctcagggacaaaataatctgcacaccaaacccccgtgacacaattttagctgtataacaaacccacatgtgtaccccgaaacaaaaattaaagctaaaagaaaaaaaaaaatcccagggtgggagagtgcaatgtaggtgaaaggactgatttttgctacagatagtggtcccagtggggctgtactgatttatttctgtgtgcatgcatgcagatgagattatgaacaggtggtccagaaccctagtttggtagagaaaacaggttgctgcagcagatttacagtctgaggggatgtaccaggagacttgttttttggcaaaaaacacttggatcaaaaacgccatggtgaagttcctgaggggggtgcctagtcctgggaggagtgtggacacatcaatatctagtgtgtgtgtttgtgagtgggtgggaatcctgtggtagcagctgtgtgaaaagggggtctgtcatcagagctcctttcctctaagttttcaggcctctgtcacccttggagaagacctggaatcacaggacaatgggcagtgtgactgcctgtgtacaggagagcagtctctcattcccaaacacccagagttttattccaggcaaggactctgtcatatcttatttctggcactaaatctgtagtttgctgaacatcaaaaaattctccaacaatttattgtctaacatttgaattctgacactacccacagtcagaacagactctgattcagggctcgggtcccaacattgtcctcactgcagatgccaatcacaaaccccatgggcccatgtatgcttctgagctaatgtttaatatttggggctgccatgacctccctgaagttgaataattttgtatagccactcacagtactcagcgaaacactgtagttatgtttaccagtttcatatataagatgcagcccaggaaaagccaaatggaagaaatgcatagaacaaagaaaagtgatggggaacgatgaaatgcatagataatgctggaaaatatttgtgattaatacaattctccatcctatatgtgctccaagaacagtttatggaaagaaacactcttcccattacaacttagacggtgctcccttttcttacctgtcacagagccagacacacactctgcacattttctcctttttctcattaaaaaaatcagctgaatttgtcttcagtggtaaaaataaaatatttctgtctttttcttgagctggaatctcgctctgtcacccacgcagaagtgcagtggtgtgatcttggctcactgcaacatctgcatcccgggttcaagaaattctcctgcctcagcctcccgagtagctgggattataggcacccaccaccatgcccggctaatttttgtattttaagtagaaacagggtttcaccatgttgcctaggctggtctcaaacttgtgacctctggtgatctgcatgccttggcctcctgaaatgctgggattccaggtgagccaccatgccaggcttaaaataaaatatctccttttttttttgagttggagtattgctctgttgcctaggctggagtgcaatggcatgatctcagctcaatgcaaactctgcatcccaggttcaagctattctcctgccttagcctcctgagtagcaggcattacaggcacgtgcccccgcaggtggctaatttttgtatttttagcagagacaaggtttcaccatctcaggctggtctcgcactcctgaccttgtgatctggaattacagacataagccaccacacccagcctaaaagtaaatacttcttaaactttacttaagcttatctccctccctcaggctcctgaactttgagctaccctcagtctgagtcaacatacaaccccattttatgtccctcctaagaatatgctgatttcagggtaagacattctcttttctataatctgactttttcaccctccatttgccattcctctcccacctcctttctaatcttgtttgctcctccctagaaaagaaagctcttttctgcctacatctatgcaagccgtaaagatcttatagttagttggtacttcctcctgttgcaatacatttttgaaattcattttttttacataaatctaacatttgtattacacaaagtgtagaaggtgcctcaaaacaataacaacttcatcatcattagtaagaccgtcccccagtttcctttcattttaaccttaactgcatctgcctgtggggccccagctttccagggctctgcagtttctctgaggatgaaggctccttccatggctcgggtgagcaggctgaaacatctgcaggaaaggttccccaagaataactaactgggcctttaataacctcctgttgcaggcttaatattagccttagcttggagtcacaaggttcaagctttaatttccatgtgagagttatttacttggtttttgaaactgttcaaaaaatccagtgaaattactcaaacactgtgtttatataagggatggaaattttaaggtgcttaattttttttttgagatggagtcttgccctgtcacccaggctggagtgccatggtatgatctcagctcactgcaacctctgcttcccgagttcaagtcattctcctccctcagcctcccaagcagctgaaactacaaagtatgcgccaccataccctattaatttttgtatttttagtagagatggaatttcactatgttgggaaggctggtgtggaactcctgacctcaagtgatctacctgcctcggcctcccaaaatgctgggattacaggcatgagtcactgcacctggctaaagtgcttgcattttataccttcataagaaaagcaaatatacctacttctttcagacaatatatgtattatcttattatttctattaaaaataatgtagtaacaaattagtcatatgggaacacttgtagaaggtaccatgtttcatcacatataatttagcattacattcagaaatgaagacaacaggatatagacatgagatatttattcactgtcacaaatttacccagcaaaaggaggtactgatgttttgatgaatttatgtaactcaattatctacaacattttcctgtggaaatatattcattgtctacagccaaaatgaaagagagatttttcttattttttcccttggtagctagcattcttaaagttaaggcttggaattctgtttgaaatcactcagccataaaaaacacacctgagaaaattcctaaactcactctgggaaagaaaaagataaatgagaatgattaacaaatggaatatatgattagatattaattttttgaaactcatattttattttctttgtaaatattttcttaactttcaagccctactaataaaatgcaaattttagttaaaaaaacatgtcagctgggtgcagtggctcacgcctgtaatcccagcactttgggaggccaaggcaggtggatcacttaagactagaagtttgggaccagcctagtccatctctactaaaaatacaaaaactagctgggcctagtggtgcgcacctgtagtcctagctacttgggaggctgaggccatgagaatcaattgaacccaggaggtggaggttgcagtgagccgagattgagccattgcattccagcctgtgcaacagattgagactgtctcaaaaaagaaaaaaaaaaagggaggtcaaaataagtgaacagatcgtttcaaggtacaggtcgaatcacccaccccatcctgctcatttacgtgctcaataaccaccctcccaggagacactgcgatatgacccagtgagtcctccaggtgcattttacttcctaaatttttacgccatctcactggggtcagttttttttgtcttttggagtgttttttttttaaacaaatttttcactatttttctgccaccccccccctgcccccgccaagaaaatctaggggacagaaattatttgttttcccctcgataccagcatctggttggctgacaagcaatgtgtctccaagaattggaagctaggttgggtgaagagaatcatgtctcaaggggttagcttttctttattttttgtgagatcgagtcttgctcttgtcgcccaggctggagtgcagtggcgcaatctcggctcactgaaacctccgcctaccgggttcacgccattctcctgcctcagcctcccgagtagctgggattacaggcgcctgccaccatgcccggctgattttttgtattttttagtagagatggggtttcaccatgttggccagcctccaggctggtctccaactcctgatctcaggtgacccacccacctcggcctcccaaagtgctgggattacaggcgtgagacactgcacccagcctcaaggggttagcttttcaggaaaaaaaaaaaaaaaagaaaaaagaagaagtgcaacaggagatgcctttcagccccaaggctgtcacctgctcttttgagaggctacactgtatacttcaggtggtcctatgggagaaaatgacccaagagctaatagtcactagacactctaccagacatagccatggtgggtatcttggtttattcccagaaagtactaaaactcaggcccagaaaaaaaactgaaggatagctgaggacacatcaccctacaaagtttacaaagggtaatcttgacccaaaaacattttggtaagttctctggaaaaataaaagaaaaagaggagccgggcgcggtggctcacgcctaaccccagcactttggaaggccaaggcgagtggatcacgaggtcaagagattgagaccatcctggcccacatggtgaaaccccgtctctgcttaaaatacaaaaatttagctgggcgtggtggcgcgcgcctgtagtcccagctactggaaaggctgaggcaggaggatcgctggaacccaggagacggaggttgcagtaaatcgagatcgcgcgactgcactccagcctggcaatagagccagattccatctcaaaaaacaaaaacaacaaaagaaatgcaggcacagatattttttacaatacagtgtcaggggattattctttgctttcttctgggaaatatttacaaagagaaaacaagtcttttcaatagtgttatgcaatgctttaaaaaaaatgattaattgaggaacgtggggtacatttcaggccctgcttaggacacatgtgaaaaatgctagggaaaaatcagtcccctgtggggtgtggaaataattaagtggcaggcaattagactgaggatgctctagtcctcggattcctccttctaaaataaaaatctaaactcaagtgcagtttttgctaaattactacattcgggaaacaaaattcaggcttaaaaaaccataaactgccaattaagctctgattacataaccaggaaatttccaccttaattgtacaaagaaactacataactatacgtattgaattattgaatatggttttcttcatcatgcaccttatcaatgtttccttcaagcccctcccatggaccgcaaactacaaactatagctgggtgctcttgaatgactgattaaattatttgatatttttgcggtgactcccataatttatgtatttatttatttttttagacaaagtcttaggccgggcgcggtggttcacgcctgtaatcccagcactttgggaggccaaggcgggcggatcacgaggtcaggagatggagaccatcctggttaacacagtgaaaccccgtctctactaaaaatacaaaaaattagccaggcaaggtggcgggcgcctgtagtcccagctactcgggaagctgaggcaggagaatggcgtgaaccccagggggcggagcctgcagtgggccgagatcgcgccactgtactccagcctgggcgacagcgagactccgtctcaaaaaaaaaaaaaaaaaaaaaaaggacaaagtcttgctctgtcacccaggctggaatgcagtggtgtgatatcagctcactgcagcctccgcctcctgggttcaagcgattctctctcctctgcctcccgagtagctgggactagagacattcgccatcacactcagctaatttttctattttctttgtagagatggggtttccccattttgcccaggctggtcttcaactcctgacctcaagtgatcagcccttctcagcctcccaaagtgttgggattactggcatttcgtacctggcaccatactttttttttttctttgagacggagtctccctctgtcgcccaggctggagtggtggtgcaatctcggctcaatgcaagctccacctcccggattccacacatttttaataacagaaaagagaaactgtgaaccccacggaccaaagctcttcccattcatgaacccacatcccgagtcaggattctcccctgacgaccctcccatggtccctgcaaaatctgggagaaacgcggcgctgccgctgcagagctgcctagaaagggctccaggccatggcacagtcactgcgagaggaagagacaggaggcctggcggcccggctgtcagcgcagtcgccatcttaaggctgaagggggctgaggccaacctgggcaaggagaacttggggcgcacattgtggagctgactgcgaagaggcctgagtcccgccacagtcacttcccaccagttccaccctgcccctcttcctgtctcgggatgtcggccgggcactctcaccatttctatgcttccagggtgtcctggggttttagctgtggatctcccaatacctgcaggtcacagggccacagaggctgggcctccaggagaataggacacagaccagtgaagacgagacctgaaacgccggctgcagctagagacaaaggccgcgccaaaagcggaaagccgtcctcgtcgctccagctgcgtgcctgattggacggtttccagcccagcgtctctgattggataatgctttaggtcccgcccctcaggccctgagtgacagaagatgtgatcagatgctgggctaagtgaagagagacagcctaagctgcagcctttacaggcagggcttccttcctgagctgacccaggccccccccagagcatgagaaaattctcttttgtactcactctccttttgaatgtattcaaaaggtgaacagaagtattttgctggcatattaataatacataaaatttttgttcaagagaaaatcaacgtttactttgttagtagtgtattatcaatactaaagctaatgtttttttttttttttttgagacggagtctcgctttgtcacccaggctggagtgcagtggcggggtctcgctcacccgattttcctgcctcagcctcctgagtagctgggattacagctactattgttgaaaaacaatagacaatcacaaaaacaagctgacctttttgtgttccttaagccctgtcctgaagagccctgtgactgggctttatgccaaacaactcgttactaaagagctgtggtcccagactgcaccgaagcttcatgagacctctcctcgtctgtgcacggacgagtggccaactctggagcccaggctgttgcttccctgtctggtggtgaatcctccacagtctgatgagggtggtgtctgactctggagctcaggctgttgcttcttggtctggtggtgagtccttcatagtctggtgagtgcgggtgtcccactctggaacccatgctgttgcttcctggcctggtggagaatcttccagcctggagagtgcggtgtctgactctggagcccaaggctggaaacttggggacgtcccaaatcccggaatggaaactcccccagttctcccccttggcgtgccctatctggtgagtttcgggggaactcatgacccaagtcataataggaatttcaagcctcataaagacatcatggttgaagcagaggtgtttcgtttccagcaaagcccaatagcaagctaacaattgctcctcgaaagggttataagctttgctggcctctggcagtttctgggtccaaaaccagaaatgtacctcttcccatcttgtttctgcctaaggctccaattagcatgttgatctaggacagttacttgcagttctacgggaccatcccaaatgggtcatagatccagggccagttgcactgcttgtttatcttgttcggaagccatgatctctttctctccccaaagtcatagcgttttctggtggctgcatgcagaggttgtaacatgttacccaagtggggaatatgatgtctccagaatccaaacaagccaataaatttctgagcctcatttttagtggtaggggttgcaaattctagtattttaggcttagcctttggtaaaatgaattatttccctgcatttcataggatgcaaccagcccctatcttgacacattatcttataagcagtaaggaaacaccatccactctgggagatcccctcagcgtctcctttgctgactggaattccctgcagcacttcacgcacaaaggtctaaattgcactaatttagattcccaattcttacaaagtccggttccccttgaccattcaattgccaagggagagaactgggggagtttccatccggggatatgggaagtcctcgagcctcccgccctgcccttgttgctaaaaagtggcacacttttgtttttgaatcctgtttgtgacaccaaaagtgttctgtgcgggaaacgcacgagggggagaaggaaagacacacacacaatacctttaagggtaaacaagcttcattccacgtaaatagcaatgcagatataataagcaaattatgtaataagcaaatcaatataataagcagattgatataacaagtagattgatataataagcaaattgcaatgggaagaggagaaaggaaaaaatatatatatatttacactcaccagactatggaggattcactaccagagtgggaagcaacagcctgggctctagcatcggacattgcactcaccagacagtggaggcctcaccaccagatgggaagcaacagcttgggctccagagtcggccgctcattcctgcacagatgagaagaggtctcatgaagcttcagcccagtctggtatcctagctcttttgtaactagttgtttcgcatgaggcctagtcacgagggcctttcatgacccggcacgaggaacataaaaatgtcaacttgtttttgcgattgcctattgtttttcaataactaatgcataggaatagattgaaatagagatttctccaaaacagcactgaatgaacgcttgaaggggctcacacaacctgttctgggactcggtgaccattgtttgtgtccacgttcaattgagttcaaatttattatttaacttttcctccacaaattcgcctgtcttgatgaatcagctctgtctaggcaaagggcaaggtgaacctcttgggccttacacaacctccacctcctgggttcaagcgattcttctgtttcggtctccagagtagctggcactacaaaagtgcaccaccacaacctgctaattttttgtatttttagtagagatggagtttcaccatgttggccaggctagtcttgaactcctgacctcaagtgatccacccacctaggcctcccaaagttctgggattacaggcgtgagccactgaggttatcactaaatgatatctttttgtttcctataacaatgtgaaattacttaaaggtggtttcaaattgaaaaaataaaaagaatgcagataaaaataaaatataaaaagttcaaaaaattacaagagattacaaaatatacatgtatatcttgagaggtcaaaaatgacaaattttgtttatttacaaggttgtatttatttatttatttatatttttattttttgagacaaaatattgctctgttgcccacgatggagtgcagcggtgcgatcttggctcaccgcaacctccacctcacgggttcaagcgattctcttgcctcagcttccctagtagctgggaccacaggctcataccaggaggcccggctaattttttttatgtttagtagagacggggtttcactgtattagccaggatggtctcgatttcctgaactcctgatccgaccgcctcagccttccaaagggccaggattataggtgtgagccactgcaccagctttataaggttttattaaaattggctttagtgttgataatacactattaacaagtaaaagttgattttctcttgaacaaaaattttatgtattattaatatgacagcacaatacttccgttcatcttttgaatacattcaaaaagagagacaatgaaaagagatagaattttcccatgctctggaatgggcctggctcagctcaggtaggaagccctgtttgaaaaggctgcagctaggccaggcccagcggttcacgcctttaatcccaggagtttgggaggccgaggtgggtggatcacctgaggtcggtagttcgagtccaggctgaccaacatggagaaaccctgtctttactaaaaatacaaaaaattaaccaggcatggtgccacatgcctgtaatcccagctacttgggaggatgagatctattatatctcacagggtttacaatttctcttttctcctattataaatttatgaggccagcggctgggcatggtgactcatgcctgtaatcccagcactttgggaggctgaggtgggcagatcacttgaggtcagaagttcaagaccagcctggacaatatggtgaagccccatctctactaaaaaaatacaaaaaaattagctgggcattgtggcgtgtgcctgtaatcccagctactcaggaggctgaggcaggagaattgcttgaacctgggaggtggaggttgcagtgagccaagatcgtgccactgcactccagcctgggcaacagagaaaaactccatctcaaaaacaaacaaaaaaaatttatggggccaggtgcagtggctcacacctgtaatcccagcactttaggtggtctaggcaggtggatcacttgaggtcaggagtttaagacaaacctggccaaaatggggaaaccccatctctactaaaaatacaaaaattagttgggtgtgatggtgaatgtctctagtccaggctactcaggaggtagaagtgagagaataacttgaacccaggagtggaggttgcagtgagctgagatcatgccactgtactccagcctgggcgacagagcaagactctgtctaaaaacaaaaaaacaaacaaaaaaacaaaaaaaagtatgagtgtctctgccaaaatggaaataatttaatcaaacagtgattcaagaattgtcgagcacccagctatagtttgtagtttgtggtccatgggaggagcttgaaggaaagacatttatagggtgcatgatgaagaaaactatattcaataattgctcaggtatggttatgtaggttcttaatttgttcaattaaggtggaaatttcctggttatgtaatcagagcttaattgacagtttatagttgcttaagcctgaattttgtttcccctaatgtaaaactttttttttttttgagacggagtctcactgtatagcccaggctggagtgcaatggcatgatctcggctcactgcaacctccgcctcccaggttcaagtgattctcctgcctcagcctcccaagtagctggaactacaggtgcatgccaccatgcccggctaattttttgtgtgtatttttagtagagatggggtttcaccatgttagccaggatggtcttgatcttctgacctcgtgattcacctgcctcggcctcccaaaatgctaggattacaggcatgagccgccacacccggccctacccctaatgtagtaattaaccaaaaaatgtccttgagtttagatttttttattttagaagtaggaatttgaggactacagcctcctcagtttatttgcctgccacataattattttcataccacataggggactgattttccatggcatttttcacatatgcctcaagggtaccccatgttcttcagttaatcattttaaaaaagcattggctaacactattgaaaagatttgttttctgtttgtaaatatttccagtgagaagaaaggaaagactaatcccctgacactgtaaggaaggagaccacctttctgcttgtctcaagcctcagaaaaagaaaagaggaagcaaaagctaaagaaagtcagaaatgagatcaatagttagacagctcctggccactccccagggctggtagttaaaaatcagctcctgacctaactgcttgtattatccatagatttcaggcattgtatgaggaagcattgtgaaattttctgttctgtccggattaccgatgcatacacgctcagttatgtaccccatgcttgctcaatcaatcatgaccctttcacgtggactcctttagagttgtaagcccttaaaagggacagaaatttctgtctcagggagccggcttttgagacgcaagtctcctgatgctcctggccgaataaagcctcttccttctttaacctggtgtctgaggagtttgtctgtggctcgtcctgctacatttcttggttccctgactgggaagtgaggtgattagtggttggtcaaggcagtcttttaggtgacttaggcctgtcctgtggagcatccccgtaggggactccagccagcctgagagacacggatcctgagagtgctcccaggtaggcaattgccctggtggaatgccttgtcagtgcagtgcatgggaggcccctgtggaggatcaatgcagtggctgaacactgggaaggaactggcaacttgagtctggacatctggaacatggtaagaccggtcttagaaacttgctcactccatttgaggggaagcatggcctgatcacccatgacgtgcctttatcggcattttggttttggttttgattttgtcttggcttaaattgcttggcaccatggttttggttttgattttgatacagtgtgaattaggcaagtgtgtgaccttttaccctttccttcttgtagtgtgagttttgtcttgtctctagagaaaaatgggtcagacacaaagtaagcctaccccacttggaactatgctgaaaaatttcaagaagggatttacaggagactatggggttaccatgacaccagagaaacttagatctttatgtgaaatagattggccagcattagaagtgggttggacatcagaaggaagcctggacaggtcccttgtttcaaaggtattgcacaagatatcttgtaagccaggatacccagaccagttcccgtacatagacacttggttacagctagttttagacccccccacagtggttgagaggacaggcagcagcagtgttagtggcaaaggacaggtagccaagaagaatcccactccacccatcgagggaagtcggttcctaaagttctgtctgaccccatatcagaagactcatggcaggaaatggcaccagtgatgcctcccccttatcgagatgagagacccccacttctgagcccacagcacctgtgcctccacaggacacacacacccctagaccacccagagtaaacaagagaggatgtgaagccatgggagaaacccctcccttggtggctcatttaggacctaagactggaacacagatgcccctgagggagcagtgatatactggagtagatgaggacaggcatgtggtaaaaagtcatgcctttgtgtatcaacctttcacctctgctgatctcctcaattggaagaacaataccccatcttatactgaaaagcctcaagctttgatttgctccaaactattatccagactcataaccctacttgggctgattgccaccaactgctcatgtacctctttaacacagatggaaggtgaagggtgctccaggcagcaactaagtggctggaggaacatgctctggccaattaccaaaatgtccaagagtatgtaaggttccaattaccaggaacagactcccagtgggacccaaatgaagggccagacatgaaaagactaaaatgatatagggaggccctcctagaagggttaaaaaagggagcccagaaggccacaaatgttaacaaagtctccgaggtcattcaaggaaaagaagagagtccagcacaattttatgagagactatgtgaggcatatcgtatgtatactccctttgattcagatagccctgaaaatcagtgcatgattaatgtggctttagttagtcaaagcgccgaagatattagaagaaagcttcagaaacagactgggtttgcaggtatgaacacttcagttattagaaatagccaatcaggcgtttgtgaatagagatgcgacgggtcgtagagaaagccgtaaagaaagtgagcgccaagcccggtgaaatgctgacctgccagccacagctattaaaggggttcccccaaagggctgaggaatgggggaccccggggaaaacacacagtctgactgaccacgtctgcagcgtaaccggtgtgcttactgtaaagaaagcaggtcatttgcaacctaccagaacctaagaccaggaggcaggtgagagagttcttaggagctgtggggatctgcaggttatggatcccaaactttgcagtactggccaaacctctgtaccaagtcacaaaggggggcatccaggaaacttttgaatgggggtctcaacagcagcaagccttccatgaattaaaagagtaactcatgtcagccccagccctgggtctgcctgacctgtcaaagccatttacactatatgtgtcagagagagaaaaaatggcaattggggttttgatccaggctgtggggccctggctaaggctggtggcctacctatctaaacaactggacagggtttctaaagtttggcccccgtgtttgagagccttagcagcaactgccctgctagcacaagaaacagataaattaactcttgggcaaaacctaaacataaaacacctcatgctgtggtgactttaatgaataccaaaggatatcattggctaacgaacgctagactaaccaagtaccaaagcttgctctgtaaaagtctctgcataaccattgaagtttgtaacagcctgaaccccaccaccctgctcccggtatcagagagccctgttgagcataactatatagaggtgttgcactcagtttgctcaggttagcaaacctgacctatgggaccagccttggacatcagtagacttggagttatatgtggatgggagcagcttcatcaacccacaaggagagaggtgtgcaggatatgcacctctggatgcttttattgaagccaaataattgcctccagggttcttcagcccaggaggccgaactcattgctttaacttgggccctagagctaagtgagactgtgaacatttacactgactctcgatatgcctttttaaccctccaagtgcataaagcattatataaagaaacaggcctgttaaactctgggggaaaagatataaagtatcagcaagaaatcttgcaattattagaggcagtgtggaagccccagaagatggcagtcacgcactgcagaggacaccagtgaactcctactacagttgctttagggaactcctgagtggactcggaggctcaaaaggcagcatccaccccttaccgggcatcaatcacagccccctttctccctcaagaacctgaacttttacctacctattctaagggagaaaaaaactttttccaagtggaagggggacaggtaataaaggaaggatggatccaggtatcggatgggagaatagctgtgccacagctacttggagcagaggttgtactggctgtgcatttaactacccatctaggtcaggaatcacttgaaaagttgttaggccggtatttttacatctcccatttatcagctcttgccaaaacagtagcgcagcgatgtgttatctgccgacagcacaatgcaagacagggtccagccgttctgccaggtatacagacatatggagcagccccctttgaagatctccaagtgaacttcacagaaatgccaaagcgtggaggtaataagtatttactagttctactctgtacctggtacctactctgggtgggtagaggcttatccaacatgaactgagaaagctcatgaggcaacccgtgtgcttcttcaagatcttattcccaggtttggactgcccttatggatcagcttggacaacaggccagcatgtgtggctgacttggtacagtaaacatcaaaggtataggagatcacatggacactgcatgcagcctaccaaccgcagagttcggaaaggtggagtggatgaatcagacaatcaaaaacagtttagggaaagtatgtcagaaaacaggattaaagcggtacttttaaccctggtactgttcaagattgatgcaacccttcaaagagaacaggatattctccctatgaaatattatatcataggccccttcctatattacagggactcccaggcactccacaagagttaggtgaaattgagttacagtgacagctacagctacaggccttaggaaatttactcaaacaatttcagcctgtgtaaatgagaggtgccccatcagcttattctccccaattcaccctttctccccaggtgattgagtgtggatcaaagattggaacacatcccccttgcgaccacggtggaaaggagcccagaccatcatcttgaccacccccccacagctgtaaaggtagaaggaatcccagcctggatccaccatagctgaataaaacctgcagcctctgaaacctgggaggtgagactgagcccagacaacccctgcaaagtgattctgagaagtgtttgtgtccctgggtacttgagattagggagtggtgatgactcttaaggagcatgctgccttcaagcatttgtttaacaaagcacatcttgcacagcccttaatccatttaaccctgagttgacacagcacatgtctcagggagcacagggctggggatagggttgcagattaaaatggagtctcttatgtctactttctatatggacacattaacaatctgatctctctttcttttccccacagaaaaatattcacaactcattctgtatgatgtaaatatagcactcaaaactgtatgtgttcttgttcatgccctcaattttatactttattatctagaaaaatatatatgaaccgatgtggcggatcttatgctgctcttttttctcagagttagagaatatattagagaatatttctgtgttgaaaactattttattggataattttagtcatcctataagtcagaaccagttctctttatgctcgcatttcaccttaagtcaaattgaaaattctgctcatggccatttaagtaaaggtgtgtgtgtgtgtgtttcagggaccactgcaatttagggatgtggccacagaattctctctggaggagtggcattgcctggacactgcacagtggaatttatatagggatgtgattttagagaaccacagaaacctggtcttccttggtgaggataacctgaatacataattcataatataccctaaagattttatttctctttttttgcagaatttttttagtaatttattcttttcataaaagagtttcagatccactttttccagaaaatcttcagaatttgttcatttagaaaagaatttcttcaagatgtttcatcttaatccagactttccacattcctgagttgagctgtattcttcactctaaattagtggtaattccagaaacttagtggcataaaatattgttgccccacctgaaaatctaattgccaccaccaatttttgattcagtagtaccagatagtaaaattaagaaaccggcatattgaaagtattcttccttcctttttttttctttctttctctttttctttctttctttctttctttctttctttctttctttctttctttctttctttctttctttctttccttctttgtttctttgtttctttctttctctttctttcttctttctttctctctctctttctctctttctttctttcttctttccttctttttttttccttttttttttttttttttttgaagagtttcactcttgttgcccaggctggagtgcaatggtatgatctccgctcaccacaacatccacttcctgggttcaagcaattctcttgcctcagcctcctgagtagctgggattagaggcctgtgccaccatgcccggctaattttttgtatttttagtagagatggggtttctctatgatggtaaggctggtcttgaactcctgacctcaggttatccaccacctcagcctcccaacgtgctaggattacaggtgtgagccactgcacctggctgaaagtattttctaaatatttataaatttctgttatgaattagtattttggtattaatttactagaatattttattatatctgctctgctgagcacatttagtaatgtgcttataattggagaatatgagcaagactcatgttatttatttttaataaaacaggtattgttgtcctaagccagacctgatcacctgtctggagcaaggaaaaaaacccttgactatgaagagacatgagatgattgccaaacccccaagtaggtgtgagtgaaaatgaatacaagagacgacagagataagaggtcccaaggtcaatgagaaagcaagtttttaaaatgtgattcaggaagctgtgttccaaaggaaatagttcctgggcagctgtgttatttgtttatttatttatttaattttgctcctacaaaggggcatcttctgtcttatgattttaaattctctaaggattccacttttcttttggtgagcttccttcaagttcacagtgagagccaaagtcctcttcatggcatataagagactgcacaggctgggcacattggctcatgcctgtaatctcagaactttgggaggctaaggcagtggatcacctgaggtcagaaattcgagattagcctgaccaacatggtgaaacctcgtctttactaaaaatacaaaaattagccaggggggttgttgggcacctataatcacagctacttgggaggctgaggccaaagaatcacttgaacccagaagacggagcttgccgtgagccaagatcgtgccattgcaccccagcctgggcaacagagtgagactccatcacaaaaaaacaaaacaagacaaacgaaaaagagactgcacaatctggctgcttttccattgttttgcagatatgcaaatatctatttgcattatttagagaaactaaaattatttttcatgttatctttttgcatcaggtctgatatgtgtgagagtaatagtttctgttgcacttttttgtttatttttttcagcacagtctattctgtttttattactataaagtcttgaaatatagtttgaaattataagtatgatatttttctgctttattccttttcctcaagattgctttggctattcaaagtttattttagtttcatgtaaattttagaattgtattttccagtactgtgaaaaaaatgccactgcaattttgataggaagtctattgaatctatagatcactttggataatatggtactttattaatatttattctttcaatccatagacaaaatattttaaaatttatttggatcttctttaattttttcattttttattgtaaagatttttacctccttggtcaatttttttctcagaaatttattacttaatgctacagcaaataagatttttttccctctattttgttagatagtttgttttaagtgtatgaaactgtagccaggcacggtggccaacgcctgtaattccagcactttgggagactgaggtgggtgtatcaactgaggtggggagttcgagaccagcctgaccaacgcggagaaaccctgtcgctactaaaaatacaaaaattagctgggtgtggtggtgcatgtcagtaatcccagctactcgggaggctgaggcaggagaatcacttgaacctaggaggtggaagttgcagttagtcaagatcacaccattgcactccaggttggtcaaaagagcaagactcctcaaaaaaaaaaaaaaaaagtgtatgaaaccctatatatacttgtatgttaattttgtattttgctaatttactgagtgtacttaatagtttagacagattttaatgtactgtttatggttttttatatacacaattgtatgatctacaaacagcaactttttactttttttatttcaatagtttttttatttctttgactaattcttctgccacatacttccagtgctacattaaaatagaagcactggccaggctctgtggctcacagctgtaatcccagcactttgggaggccgaagcgggtggatcacctgaggtcaggagtttgagaccagcctgaccaatatgatgaaaccccatctctactaaaaatacaaaaattagctgggtgtgtcgacatgagtctgtaatcccagcaactccagaggctgagacaggagaatcgcttgaggcaggaggcagaggttgcagtgagccgagatcacaccaatgcacttcagcctgggcaacaagagcaaaactgcatctcacacctacacacacacacacacaaaatagaagcattgacaatgctcacaatatagttttgtattggtgtctgaattcaatgcagcaaatacctcttcaagttttcacaaactgattttagaaggtaaagatcttttgttggcccttagggtgatgagatgccctctgaatttgtagtgaagaggggttgtagcttggtcacaaggctgctgggtctgcactagggtccacctttagttggcttgttacaggggctttggtagttgtaattctcattttatttttagacagactgaatatccttcaagactttgttccatagggcagacactagggcaggtttttgcagtcaggtctgcatatgctgggccttgtatcaggatgtggatgagtgtggctttcagtgagtaccaaagagcatttcctcaggtaactgtgtgggtttctatataggcagaactgaccataaactgtggctcaggtaactgaaactgagtcattgaattgcttcagggaccacagtaaaggccaaagtctgcaggcctgcctacatggctgtaagtgtgtgccttcctccaggtcagggaatggcaggacctctgccagactgtggctgggaaaagtttgggatggttacagagtaagttctgaattttcagtaggaccaagttggatgaatcttatcctggtctgtagccaagaacaggggtcctgtagtttcgcacctgaatgagggcctgccttctgaataaaactcttctcaatcttaagctttgacagtgtttcacaactccctccctggatctcaaatctctcttagaggcacttattttggagatggcatcttgctacataacccaggctggtctcgaaatcctggcctgaagcagtgacataaccttaatgtaccatgtagctgtcattacatgtgtgagccacaatgcataaaggcatttttgtcaggtatggctgatatatatacatacacatatatatatatatatacatacacatatatatttttattgtaaggggatatgaaaatagggcacttttagtcttttcatttttttctttttctttttttttttttgatgtggagttttgctctttttgcccagactgtagtgcaatggcacgatcttggctcactgcaacctccgcctcccaggttcaagcaattctcctgcctcagcctcccaagtagctaggattacaggtacctgccaccatgcctgactaattttttgttatttttagtggagatggggtttcaccatgttggccaggatggtctcaatctcttgacctcatgatccgcacgccttggccttccaaagtgctgggattacaggcatgagccactgcacccagctagtctttttatcttactgatgtcactctccttatacatttttactttctattttctacttcaagtttgtctgtaattttagattcagatatttaaaacaatttgttaaaatttgcatattatgcctgcagtaaattagataattagtgggcactccatatttactaaaatatttacttataaatttaattttgctgctggcaaaaaggaattacagaattttcctctactttcttcagcctatatctgaataacaacatagtttattttctaattgttttacatatcagagggtctaaccctattctgcaaagtagatatatatattttctatatttaacaatgtaaggctattctttgcttcaaagttggattacagcagtttcattttgtgtaagaatagcatatatttaaaacaaatataactctagtttcttttaaatgctatttattagaagtttctcattagaatcttctatttataattatactccttattctctgaaattttactgccacacagtgcatgccaatgattcaaaatactcacatttgatgagtatacagtaatagttaaatattccagttacctagacaattttttttgtttttgtgagtctgagtcacgctctgtcacccaggctggagtacagtggtgcgggcttggcttactgcaacctccacctcccgggttcaagcaattctcgtgtctcagctttccaaggagctaagattacaggcataagccactgtgcctggcctcagtgtaggtttcttaacatcagttttttgtgtctgttggctttactttcgtattacaattttagacaatttgcaattctgtttgtacagtttaagtcaatttgaggtttaattaagagataaattatgcatgtttatcacaatcagattacatatgtctgtgtgtttatttataaatgtgaccccaattttagttatggcttatcctatattctttcttagccgattttcaatggcagttttatcttgtctaagtgagttgtcatggaggtagtcttatttttaccatgtgtttaatgatgaatacatatttcgttttgtgagagaaacactttagtgatttgaaggtaattttcaaaaagatttataattctgtatttttttcagttttttttttaaagaatttttttttgagacggagtcttgctctgtcgcccaggctggagtacagtggcgtgatcttggctcactgcaagctccacctcccaggttaacgccattctcctgcctcaggctcccgagtagctgggaccacaggcgcccaccaccaagcccagctaattttttgtatttttagtagagacggggtttcaccgtgttagcctggatggtctcgatctcctgacctcgtgatctgcccgcctcggcctcccaaaatgctgggattacaggcgtgagccaccacgcccgaacaaaagaaatattttaaaaacacataaaatgtaccatcttaaatctattgaagtgtatatttcatggccaggcatgtttgtggctctcatctgtaatcccaggattttgggaggccaagacagaaggatccctggagcctgaaagcttgagaccagcctgggcaacatatggagacctttctctattaaaaaaaaattaataattgccaggcatggtggtgtgcacctgtggtcccatctactttggagattgagggggagtcaaaattgtgcctctacattccctcttgggtgacagagtgagatcctgtctcaaaaaaaagctgttcatttcaggaatgttaattatattcgcattgttatgcaaagacttctagaaactttacatcttgtgaaacttaaactcagtacccattaagtaacaactgctaattttactctctctccagccctagactggacaaaccttccactttctctttttatgattttgacttcttaagatacctcatataaatggaatcatacagtatccattattttgttactggattaattcaggtgacataatattctcaaggttcatcttaaaatatgacatgatttttttttaaggtgggataatatttcatcatatgtatatgttacattttttgatatgtttataaatcaagagacatctgggttgcttcagccttttgtcttttgtgaatactggcacaataaacatggattttcaaatatgtcattattattatagcaagtggggtattgaaatagcctagtataattatatttctctctatgtgcttattcagttttgttagtatttgctttatatatttgaaaccctaatttgaaacacagacacacacaaatacacacaaatttgtgataagttcccagtgaatgaatctatgtattgtttaatgcccttctgtgtctttttgaagttttgacttaaagtacattttataaaatatgacagtttttgacttaagatgtagcttttgtaatattattttgacctcttctgctctcatttcattaatatttacatgaaatttctacttccatctcaccacttacagtctttgtcattagatctgaggtgactcttgtagaaaggcaagttggatcttgattttcaaattttttttttttgagatggagtctcactctgtcacccaggctggagtgcacgtggtgcgacctgggcttactgcaacctccgccttctgggttcaagtgattctcctgcctcagcctcctgagtagctgggattacaggcaggcaccaccatagttgactaacttttgtattttttgtagagacagggttttgccatgttggtcaggctggtaaaattttttaaaaaggctttttattgaaagtatgtctcttgattggaaagataattatatatatttaaatagttttctgaaagaggaaaacttaataatttgtgtgtgtgtgtgtgtgtgtgtgtgtgacagagtctcactctttcatccatgttagagtgcaatggtgcaatctcagatcactgcaacctctgcctcctaggtccaagggattctcctgtctcagccacctgagtagctgggatcacaggcacctgccaccatgcctggctaatttttggtatttttagtacagatggatttatgccatgttggccaggctgggcttgaattcctgaccttaagtgatccaacttccttggcttcctaaagtgctgggactacaggcataagccgccgcacctgaccaatgttactttattaattgttttatttgattcttgtatctttgtctctcattttttctgcctttgtgtgtgtgtttttttttaaatttttgtattgatatgctttcaattttcttcttattttcttttgtgtatctatacagatattttcttagtagtgtcttggggattacacaaaacctctaaaagatccaacaatatgtttaaatgaggtaaaaaattaacttcagttgaatgcaaaaattcttcatgattacatctgccttcaactttgttattgattttgctaattatattatttatttatttatttatttattttttgagacggagtctcgctctttctcccaggcaatactgcagtggcactatctcggctcactgcaagctccgcctcacgggttcacgccattctcctgcctcagcctcccgagtagctgggactacaggctcctgccaccgcgcccaacctccgcctcccaggttccagtgattctagtgcctcagcctcctgagtagctgagattacaggtgtgcaccaccacacttagctaatttttgtatttttagtaaaggcaggctttcaccatgttgaccaggctaccttttatttgtttgtatatttctttcttcctttccttctttatttctagaagcatgttcgttttaaaatataaattatgaatattaaaaatcttcttttctctgtctttgattactattatggctgatttaaaaataagttttggaagaagagaaaacggcagggcggcagcggctgtaggttgtgcggcggcagcggctcttccctgggtggacgatggacagccagagcaggaaggtggtggtgtgcgacaatgacactgggtttgtgaagtgtggatatgcaggctccaactttccagaacacatcttcccagctttggttggaagatctattatcatgtaatgcccaaccttgttttttcctttatttacctagccttgtttctcccttagctaagagaaccagacaaactccatcttggctctttcactggcagccccttcctcaaggacttaacttgtgcaaggtgactcccagcacatccaagaatgcaattaactgataagatactgtggcaagctgtatccgcactccccaagaattcatctgattgataacgcccaaagccccgcgtttatcaccttgtaatagtcttaaagcccctgcacctggaactgtttactttcctgtaaccatttaccttttaactttttgactacttaacttctgtaaaattgttctaactagacacccctccccttcctaaaccaaggtataaaagttaatcaagccccttcctctgggccgagagaactttgcacgttagccgtctctcggtcgccggctaataaaggactcttaattcatctcaaagtgtggcgttttcctaactcgctagggtacaacaatcagatcaaccaccaaagtgggaaacattgaaatcaaggatcttatggttggtgatgaggcaagtgaattacgatcaatgttagaagttaactaccctatggaaaatggcatagtacgaaattgggatgacacgaaacacctgtgggactacacatttggaccagagaaacctaatatagataccagaaattgtaaaatattactcacagaacctcttatgaacccaaccaaaaacagagagaagatggtagaggtaatgtttgaaacttaccagttttccggtgtatatgtagccatccaggcagttctgactttgtacgctcgaggtttattgactgctgtagtggtagactctggagatggcgtgactcacatttacccagtattagaaggcttttctctccctcatcttaccaggagactggatattgctgggagggatataactagatatcttatcaagctacttctgttgcaaggatacaccttcaaccactctgctgattttgaaacggttcgcatgattaaagaaaaactgtgttacgtgggatataatattgtgcaagagcagaaactggccttagaaaccacagtattagttgaatcttatacactcccagatggaggaatcatcaaagttgggggagagagatttgaaacaccagaagctttatttcagcctcacttgatcaatgttgaaggagttggtgttgctgaattgctttttaacacaattcaggcggctgacattgataccagatctgaattctacaaacacattgtgctttctggagggtctactatgtatcctggcctgtcatcacggttgaaacgagaacttaaacagctttacttagaaagagttttgaaggatgatgcggaaaaacttcctaaatttaagatctgcattgaagacccatcccgcagaaagcacatggtattcttgggtggtgcagttctagcggatatcatgaaagacaaagacaatttttggatgacccgacaggagtaccaagaaaagggtgtccttgtgctagagaaacttggtgtgactgttcgataaactccaaagcttgttcccatcacacccgtaatgctttcttttttcttttattgccaatctttgaactcattcaactccaggatatggaagaagcctttctctaccctttgactggaaaggtcaagttttattctggtgtcttgggggagctttgttaaatttttgttaatgtgggtaaatctgaatttaattcaactgcttccctacatagactagagggctaaggattctgtctgctgctttgtttcttctaagtaggcatttagatattcctgtaggcttcctattttcactttacctctctaatgctgctagtcactaggtggtacgcatttattagcataagaaaaaaactttaacaggagcttttacatattactgggattgggggtggtttgggatgggtgggcagctgctgaaccctttagagcatttcctctgtaatgtggtgctttcaactgtactgctgcagctttaagtaccttaaagcttctcctgtgaacatcttagtgaaatgttaggttcagaactaaagtgttttgggtagattttgttgctggggagggtaacagtgggtggtctgatttttatttttgaggtttttcacactggagtacatagaggaactttatttacagtattttgatttggcaggttttcttctacttgtgctctgcctggagctgtttccatatgataaaaaaagcaagtgtagtattccattactatgtggcttagggatttatttgttttttaaaatcaaccacgttagctgggactagactccctacaatccttcaatggaaaagtaacatttaaaaatccttggccgggcgcggtggctcacgcctgtaatcccagcaccttgggaggccgaggcgggtggatcatgaggtcaggagatcgagaccatcctggctaacaaggtgaaaccccgtctctactaaaaatacaaaaaattagccgggcgcggtggcgggcgcctgtagtcccagctactcgggaggctgaggcaggagaatggcgtgaacccgggaagcggagcttgcagtgagccgagattgcgccactgcagtccgcagtccggcctgggcgacagagcgagactccgtctcaaaaaaaaaaaaaaaaatcctttgggtaattcaaattacagatttgaaagtgcttaagatctggtgttttgttaatgcttctgtttattccggaagcattaaggtaacccattgccaagtatcattcttgcaaattattctcttatataactgaccagtgtgtaataaaacaagcaggtacttataaataattactggcagtaggttataattggtggtttaaaaataacgttggaatacaggacttgttgccaattgggtaattttcatttttctttctttttttttttttttttgagacagcgtcttgctctgtcgcccaggctggagttcagtggcatgatctcaactcactgcaagctccacctcctgggttcacaccattcttctgcctcagcctccagggtagctgggactacaggtgcccgccaacacgccccgctaattttttgtatatttaatagagacggggtttcactctgttagccaggatggtcttatctcctgaccgattgggtaattttcattagttgttttatttgttttgatttgaaacctaatttgactgtttaaaatgttggccaaaaaaatcaagatttaaattttttatttgtactgaaaaactaatcataacttaattttcagccatctttgaagcttgaaagaagagtctttggtattttgtaaacattagcagactttcctgtcagtgtcagaaaatcctatttatgaatcctgttgatattccttggtatctgaaaaaaatatcaaatagtacccatacatgaattatttctaagtttgaaaaataaaaagaaactacatcacactaattacaaaatacaagtttctctcgcatccgtgtggagaccaacaaacaggctttgtgtgagcaacaaggctgtttatttcacctgggtgcaggtgggctgagtctgaaaagagagtcagccaagggagataagggtggggtcgttttataagatttgggtagataaaggaaaattacagtcaaaggggggttgttctctggagggcaggagtgggggtcacaaggtgctcagtgggggagtttctgagccaggatgagccaggagaaggaatttcacaagataatgtcatcacttaaggcaaggactggccattttcacttcttttgtggtggaatgtcatcagttaaggcaggaaccacccatctggatttgtatgtgcaggtcacaggggatataatggcttagctttggctcagaggcctgagaacaaattctggaaaaaaatatttttcttcattttaaaacttttttttaaactaataatggctttgaaagaagaggcttaatttggggtgactaaattcaaaagaaattattgacttgagggtctctgtttggtaagaatacataattagcttaaataagcagcaaaaggttagttttaattatgtaacttctgttaatattaagtgttttttgtctgttttacctcaatttgaaaagataagtttgcctgcatgctggacatgcctcagaacacatgaatagcccatactagatcttaggaacatggatctttgagtcactttagactaagttcttatataaatatccccagctttttgagaacagagcttgttaaaggatgcacatgtagggccagtacctactggcaattgtgttcagggaaatgggattgacttggccatttgtcctttggtcataattttaaaatgtgggagtaaaaaacaacaaagaattgaatggactcttaaaacaatgaaagagcatttatcatttgtcccttgaatgtagaatttgtttttgatttcataattctgctgggaaacgtgacagttaaaatggtgtattatgtatatatattataatttagaaataccattttataattttactattccaaggtgacataatgcatttaaatttgggatttgggtggagtattatgtttaactggagttgttgtcaagtatgaatccctcaggaaaaaaaaaatctgttttaaaaagcaatctgattcttagctcttgaaactattgttacttaaatttccaataattaaaaattttaaatttttaaattagaattgccaatactttgacctttgagaagggtttcttagaaatacatttagtaatgtccccaagacattagtcttacatttaaacttttttctttaaaacatggtattggtggttaacttttacacagttctgagttctgctaatatctggaaagtatcttgagatatcagtggaaagctaaacagtctaaatttaacatgaaatacttctttttgattcagaaaataaaatcagatttttttaatgtcaaaagcattaaaaaattaaaaaaacaaaaataagtttttttgaaattatctgcataaaggtttttgcttcattattgacataacttgagacaatacagaaatgaaaatgaacatttgttagtaaaacagcaattatctagctcctggtagtgatttaatctctcacctagtctttagaacttccatcaagacaagaactctttttttccaagagtgtgtgatgtaaaatcacactcttgtttttttgtctttgtggcagaatttgggtatttatggtaatgaaaaagaattctaggtctcttttcagaagaaagatggtgatgatggaagcaaatataatggtacttggtacttagccacatttcaaagcatgccagtacaaagctaaatgaagaaagtcaaataggaaatgagaaaaaaatagctcctagaaacacataaaatgataacaatataattaacaaacaatttttttttttttttttttggttttagacagagtttccctcttgttgcccatgctggagtgcaatggcacaatcttggctcactgcaacctctgcctccgcggttcaagtaattcttttgtctcagctttcccagtagcttggactacaggcacatgccaccacgcatggctaacttttgcatttttagtagagagagggtttcatcatattgatcaggctgatctcaaactcctgacctcagatgatccacctacctcagtttcccaatgtgctgggattacaggcatgagccacagcgcctggataacaactttatttctttaagcaattattttaaatataagttaattaaactacttaataaaataaaatgaaatgtaattttaggactttggaaggccaaggtaggctgatcacttgatcccaggagttcaagacaggcctaggcaacatggcaaaactctgtctctataaaaaatacaaaaaagctagcctggtgtgacggcacatacttgtaatccaggtatttgagagactgaaatgagataatcagcagactttgagagattcaagcagcagtgaaatatgcaaatcagcctggttggcacagtgagttccattctgaaaaataaatgaggctgggcatggtggctcatgcctataatcccagccttttgggagactgaggcaggcagatcacttgatgtcaggacttaaagaccagtctggtcatcatggtgaaaccccgtctctctaaaaatacaaaaaattagcagggtgtggtggcagacacctgtaatcccagctactcaggaggctaagccaggagaattgcttgaacccaggaggtggagtttgcagtgagcagagattgcaccattgcactccagcctgggcaacaagagcaaaactccgtcgcaaaataaataaatacatatataggctgggtacagtggctctcgcctgtaatcccagcactttgggaggctgaggtgggaggatcatgaggtcaggagttcaagaccagcctggccaatatggtgaaaccccatctctactaaaaatacaaaagatagttgggtatggtggcacgcatctgtagtcccagatattcaggaggctgaggcaggagaatcacttgaacctgggaaatggaggtggcagtgagccaagattgtgccactgcacaccagcctgggcaacagagcaagactccatctctcaaaaaaataaaaaaataaataaaaataaataaataataaaaaaaaggaaatagaatgcttgtgcggttttttaaaaagcatacgctatgctgcctacaagagattcatttaagcattgagtcaaataggctgaaagtaacagaatgaaaaaaatgtacattccatgaaaatagtaaccacgattgagtgcagtggtcataattatattagacataatatgctttaagtcaggtagtaccatgagacaaagattgacgttatattatgttaaagtgagttgatttaccaggaatctataactataatatttacttatctatatatatatgtgtatataacatcagggctccaaaatatataaagcaactattgacaaaagtgaagcaagacatacatagcaacataattgtaaacatcaaaaccccatttgcaataataaatagaaagtttagataaaaaataagaaacagaaaacctagacaccattatagactatattaattattttgcatatagatgaatatttgagagtgcataatttataaagaaaaaaggtttagatggctcacagtttggcaaactgtataagtgtgtgccagcatctgcttctggtgaggatttcaggaagcttaaaatcatggtggaaggtaaagagtaactggatatattatatggtaagagacagagcaagtgtgaggtgaagaagccaggttcttttaatgaaccagctctcatttgaattaatagagtgtaaactttttggttaccaagaggatgtaccaagccattcatgaaaaatttgcccctatgacccaaatgtgtcccaccaggtcccacattcaacattgaggatttatattgcagcatgaggtttggaaaacatggacatccaaaccatattatagaccaactagcgttcgcagacacacacaaaactccccagtcaaaaccaagataatgcacaatattcttattttcatctggtgtattttgttagggcacatagcaggttttattaaattttaaaatactgactgggtacagtggctcttgcctataatcttaacactttaggagaccaaggtaagaggatccaccaggaattatgaatatttttcagatggaaaagacatgttgagttagaagacacctctcaaatttttttttttttttttttttttggagacggagtctcgctctgttgcccaggctggagtgcagtgctgtgatctcggctcactgcaagctccacctcccgggttcaggccattctcctgcctcagcctcccaagtagctgggactataggcgtctgacacctcacccggctaattttttgtacttttagtagagaacagggtttcaccatgttagccaggatggtctcgatctcctgacctcatgatcctcccacctcggcctcccaaagtgctgggattacaggcggagccaccgcacctggccaccttttttttttttttttgagatggagtttcgctctcgttgcccaggctggagtgcagtggcacgatcttggctcaccgcaacctcggcctcacaggttcaagcaattcttctgcctcagcctcccaagtagctgggattacaggcatgcaccaccacaccaggctaattttgtatttttagtagagatggggtttctccatgttgaggctgatctcaaactcctgacctcaggtgatctgcctgcctcggcctctgaaagtactgggattacaggcatgagccaccacgcccggccatacactgtgtattttctaacaaaaactgaattaaactaggaattaaaagcaaaagtcaaactggaaagttcaaaaatatgtatatataaaacacttcaatatatttttgctcaggggtcaaaaaattttatttttcaaaaatgtcaatacaacctaccattaaaagataatacaaagttgtttgtcagaaatgtttatttatttacagaaatagcattgattattgattagatatatatcgttatggtttagggtatgggatatagtgtccaatgtggcattattagtttaatttatagctacttgtggcaatagtgaacagtttcaagacatgaatacatagttcaaagaggggagaaataactgcacttttattttcatctctctgaatttgataaccaaaaggacttgcattttttagataaaagttttttatttcccaaatctcaagatctaaattcaaaatttggagctgcacatttagggcctgaatggctggagtagcagcaggtgttacctgtacatttgtgagcactttggcaagaggaggaaggggaaagtggagattctcatgtctatatgtctactcaatgcacacacgttactctgattgggtttctgggccaaatagtttctgtatcagttccagtctgaagatacaagagtcagtgaaagaggtaaaatgattgattgctgccctgtgaagtttgtagaaatgtgatctagcctctctagaagtgactgcagaggactatgaatgccaactaggcagagacacaattctgcctgcatatttaggggacagcatgcactttgctgcacaactctgagctgactggaagcctgagagggaaagtctcctctagagtaaattctggatgtcaccttatgtgtttatatcatgtctggtaattctagacagtgtttggaaacaataattaaatgaaaatttttctccaccccagagaaactccacaataatagaatagaaagaaactgttttattacacaattgaacttgaatgtgacacggatcttcatcaatctgcttaagagacggaaagatggtcactataattaggccacaagtagaagaatttccagcaccatgtcatacatagttcatcctaaattcacctggatactgaagaggccatctgtgtatgctaattacttatattcaatgacaaaaacttttcacatcttcataataggatgtagtttagcagcttgaagccaggtgcctgctgaaggtaggctttcactctgctacaaaaatggttgaatagtgttctatctttttggctacttacattttagagcagtggctctgtactccctggcactgggctacagcactcctgcttgctttctcctggttgctagtgtcctctcttggcctctaccatctgccactgaggcacaaaccacagctcacattttatgtgaatcctatttgccacagcagcactctagtgtcacatcagagagtgaggcctgagctgcaggaggagagcctgcaggcctcctgggtagaattacaccttcacaatcatgagaatgtgagcagtgtttcagcgtcaatttctacgtatagagatgacaaggaaaagataaagctgaattttcagcatgagtccagatagtgatagctgcaaaaattctcattgtgacagcccaccttaatctgacaccatgggacactaatagggcttctgaaacacacacccaaagcattggagagaaaaatgagatcttgatctgagcaagattattttcatagaaaaatattataaagatcttaagaaaaagctcagattagatatgattgatcaagtcagtcaaaaaatattcccctaaaagcaatttctctctaaacacccaaagtgcacagctactctcagcatgagaaacatgagcttcaggaagaaagaaggcagattttcagaagaattttataaagttttttttccatctttggtgctctctcatctcctagccagtgaatggagttctatattgaaatacatctgacaacttccaacaacactttttgatgaagaaatagaatctgactgttttcatagagtggaatatattagaacttgtaggctgggcgtggtggctcacgcctgtaatcccagcactttgggaggcagaggtgggtggatcacgaggtcaggagttcaagaccagcctggccaagatggtgaaaccccatctctactaaaaatacaaaaaagtagccaggcacggtggcaggcgcctgtagtcccagctactcaggaggctgaggaaggagaatcatttgaacctggagggtggaggttgcagtgagccgagatcatgccactgcactccagcctgggtgacagagtgaaactccatctcaaaaaaaaaaataaaaataaaagaacttgtaacatagttaactgaatagctattattggttttgggtggccacatcacctgtctttatttttcctgtaatagcagcattccaatttagtgcaataaaagatactaaagttgtgttaattcataattatccctattgaataaagtaataaacatgtcacactaatatctactgtaacaatttggtagtaaattttctttggatattaggtataagtatctaagtatgaataattttaatgaactagtcataatgtatgtagcattttaaaaaattgcaactatagccaggcacggtgtctcacatctataatcccagcactttgggaggcctaagcgtgcagatcatgaggtcaggagtttgagaccagcttggcctatatggtgaaaccctgtctctactaaaaatacaaaaattttagccaggcatggtggagcctgcctgtggtcccagctacccgggaggctaaggcagaagaatcgcttgaacccaggaggcagaggttgcagtgagatgagattgcagcactgtggtctagccaggacaaaaaagtgagactccgtctaaaaaaaaaaaaaaaaaaaaaattcaactatacttcagttaaaacactatatttcaaaagtataaataacaatattaaaataacaacttaagtgattcattcaaagtaagtattgtggctttatattcatattatgtagaaaatactgtttacaggtcacgcctgtaatcccagcactttggaggagtgaggcggttggaccacctgaggtcgggagttcaagatcaagctggccaacatgagaccctcatctatactaaaaatacaaaaacttagccaggcatggtggcacatgcctgtaatgccaggtacttgagaggctaaggcaggagagtcgcttgaacctgagaggcggtggtttcagtgatccaagatcatgccactgcactccaacctggacgacatggtgagactctgtctcaaaaaaaataaaatactgtttaatgtatatgaatgcaatttgtttacaaaccctacacataactatgctaatcgttctgaagtaataaatagaaagcaagatacaactacagactctactgttcagtttatgcactgaactgtttttgctttcaccgtataagtccttcagcctgcaaatattgggtaattaccttggataatcagatttctttcaaagaaacttagtatctttcagtctttatcattctgtattgcaaaatttaatcctatctttgtgctaagcatctgtgtgctcttaaaatgagcatttatctaaaccatctgtgtctactttaaaggactaaaaatgaaaaagataaacttttcagaagcaaaaagaaagcaaaaaacctgaagtactagataaagataatctggagtctgaaaaaatgactaaaggtttatttaactgttaatataatttacatatatttcaaaaaagcagagaaaaatatctacatataatcaaaatgccttaagaaaagagagaatagtaaaatagctttttgatactttttaaagagtttttgaactcttggacacctgaattttgcacactatatgcacttaaggtgatgcttatgggagaaaaacacaagagagaatgatgttataaaaaaatccatgcatgcaaaagacctttgcaacagaatagagagaccagaaataatgccaccctcctacaaccatcagatttttgtcaaacctgacaagagaaaagtgggaagaattctctctttaataaatgatgctggaataactacctagcactatgtagaagacagaaactggaccccttcattacaccatatacaaaaatcagctcaagataaattaaagacttaaatgtaaaacttaaaattataagaaaccctgcaatataacctaaaaaatactgttctagacatagaaactggcaaagacttcatgatgaagcttccaaaagctattgccacaaaagcaaaaattgacaaatgggacctatttaaactaaagagcttcttcacagcaaaggaaactatcaacagagtaaagagacaacctacagaataaaagaaaatatttgcaaactttgcctctgacaaaggattaatatccagaatttattaagagctcaaacaagtttacaagaaaaaaaacaaacaacctcattaaaaagtagaaaaaaaatgaacatattcttttcaaaagaagacaaatgtgcagttaacaagcatgtgaaaaaaatgctcattgctaattattagagaaattaaaagaaaaaccacaatgagatactgcatcatacccatcagaatggctattttttaaatgtcaaaaaataacagatgctggcaaggttgcagagaaaagggaatgcttatactctgctggtgggagtgtaaattagttcaacagctgtaaaaagcagtgtggtgattcctcacagaattaaaaacagaattatcatttgactcaggaacctcataattgggtatatacccaaagaaatataaattattataaagacatatccacatgcatgtttattgcagcactattcacaatagcaaaggcatggacgggtcctgaatggctatctatgatagactggataaggaaaatgtggtatggtcagatgcggtggctcacgcctgtaattgcagcactttgggaggctgaggcaggtggatcacacggtcaggcgtttgagagcagcctggccaacataatgaaaccctgtatctactaaaaatacaaaaaattagccaggtgtcgtggcaggcacctgtaatcccagctactcacgaggctgaggcaagagagtcacttgaacccaggaggcagaggttgcagtgagccgagatcacgccagtgtactccaaccgaggtgacagtgtgagactttgtcaaaaaaaaaaaaacaaagaagaagaaattaaaaaaaaagaaaaacgaactggacctttaataacttcctctttctggcttaatattagccttagcttggagtctcttggttaaaactttaatttccatgtcagaggtattcacttggtgttgaaactaactgaaaaatccggtgaaactactcaaagtgtttacataagggaaggaaatttaaagtgctcacttttttttaatggtttttttttttgagatggagtctctctctgtcacccaggctggagtgcaatggcacaatctcagctcactgcagcctccacctcccgtgttcaagccattctcctgcctcagtcttccaagtagctgggactacagtcatgcgccaccacactcggctaatttttgtaattttagtagagacggggtttcgccatgttgggcaggctggtctcaaactcctgaccttaagtgatcaaaccgcctaggcttcccaaagtgttgggattacagttatgagccagtgtacctggctaagatgcttacattttattcctccataagaaaagcaaatatatctacttctttcagacaatatatgtattattttattatttctattaaaaataatgtagtaaaaaattagtcatatgagaaaacttgtagaagataccatgtttcatcacatataatttagcatttaattcagaaatcaagacaacatgatatagaactgagatattcactgtcacaaatttaccctgcaaaaagaggaactgatgttttgacaagtctatgtaactcatcaattatctaccacattttcctgtggaaatatgtttattgtctacagtcaaaacagaagagagattttctttctttcttttttttttttttttatggagtctatctctgttgcccaggctggagtgcagtggtgtgatcttggctcacggcaacctccacctcccaggttcaagcaattctctgcctcagcctcccaagtagctgagattacaggtgcctgccatcgcgcctggataatttttgtatttttagtagagacagggtttcactgtcttggacaggctggtgttgaaatcttgaccttgtgatgcatccgcctcgtcctcccaaagtgctaggattaccggcatgagccactgcgcttggctgatagctagcattcttaaagctaaggcttggaattctgtttgaaatcactcagccatagaaaacacctggccaggcatgggggctcatgcctgtaatctcagcactttgggaggctgaggcaggcagatcacgaggtcaggagttcgagaccagcatgaccaacatggtgaaacctgtctctactaaaaattaaaaaattagccgggcatggtggcatggtacctgtaatttcagctactcaaaaggctgaggcaggagattcccttgaacccgggtggcaaagctgagatcatgccacttgttggggtgatcagacccaataccagaccattgtggctatgaagtccagtggagtcaaaggaatgagaaaagacaggttaagagtacataaggtgggtccagagggccaaagctagtatggaaactgtgagggccccaagctttggaagcccacactatttattggtgatcaaacaaagaagcaggtggtgaggatgtgtggatgtgggggtaaacaggtgaggacataaggacgtgagggtagaaaggtaacagtgcatcaagtgtagctgtgacggtttagcattttctttgacacataaagagtatgctctgctgcttgagataatggagaacatatttatgagcctgggagagcaaccaacaagtctgtgcacattctagaggccacgaggggttttatgccctgagccttggattccatccaagccgtgaggggttttatgccctgggctcagatttgtgttttgtcagggcagccttccaccatttggcacagagtttgatgttccaaaggccatgagggattttagaccctggacccaggacatcttccaagactcttttatattatgacagacaagccagtcctgcctcagctcttctaccaacaccactgcacttcagcctggttgacagagctagactccatctcaaacaaaaacaaacaatcaaacagaaaaacacctgaaaatattcctaaggttactctgggaaagaaaaaggtaaataagaattattaactaatagaatatatgattaaatactaatttttgaaactcatctctattatgtcttttgtaaatattttcttatttttcagcccctactaataaaatgcaaatcacagtaaaaaatactgatacagctcagtgcagtggctcatgcctgtaatcacaacactttgggggccaaggcagggagatcacttcacaccagaagttttggagcagcctggtccctctctactaaaaacacaaaaactagccaggcaaagtgttgtgcacctagctacttgggaggccaaggaatgagaatcacttgaacccaggagggggaggttgcagtgagccgagatcaagccactgcattgcagcctgtgtaacagagtgaaaccgtcaaaaaaaaaaaaaaaaaaaaaaaaaacccgaaaaaacgaaaaaacctgaggtcaaaataagtaaagaaatcttttcaatgtacagacccaatcatccaacccatcctgttcacttacatgctcaataaccaccctcccaggagacactgctctatgccccagtgagtgccccaggtgcattttactttgtttttatgccatctcactggggtcagtttttttgtcttttggaattttttatttttattacaaaattttcactgtttttatttcactgtttttctgcccccactcaagaaaatccagggggcagaaattatttgttttgccctcaataccagcatttgattggctgaccagcaatgtgtatccaaaaaatggaagctaggttgggtgaagaaaatcttcatgtctcaaggggttagctttaaaaaaagaaaaagaaaaataaaaacaaacatgcaccaggagatgcctttcacctccaaggctgccacctgctcccttgagaggctacactccatacttcaggtggttctatgggagaaaatgacccaagagacaatagtcactagacacatagccatagccatagtgggtatcttggtttatccccagaaagtactaaaacccaggcccagaaaaaaaaaactgaaggatagctgaggacacatcaccctatgaagtttccaaagggtaatcttaacctaaaaacattctggtaagttctctggaaaaaaaaaagcaaaagagggacagatatttttacaatacagtgtcaggggattattctttgctttcttctcagggaaaatatttacaaacagaaaaaaatctcttcaatactgttatgccatgctttgtataaaatgattaattgaggaacatggggtacacttgaggcgctgcttggggcacatgtgaaaaatgccaggaaaaatcagtcccctgtgggatgtgaaaataattaagtggcaggcaattagactgaggatgctctagtacccagattcctacttctaaaaaaaaaaaaatctaaactcaagtgcattttttggtaaattactacattaggggaacaaaattcaagcttaaacaactataaactaccacttaaactctgattaaataaccagggaatttccaccttgattgtaccaattaagaaactacgtaactgcatctaaccaattattgaatttggttttcttcttcatgcaccttataaatgtcttttcttcaagaccctcccacggagaacaaactacaaactatagctagctggtctacaattcttgaatctctctttttgaggctgggcacggtggctcaagcctgtaatcccagccctttgggaggctgaggcgggcagatcacaaggtcaggagatcgagaccatcctggctaacacggtgaaactgcctctctactaaaaatacaaaaaattagccaggcacggtggcaggagcctgtagtcccagctattcaggaggctgaggcaggagaatggtgtgaacccaggagatggagcttgcagtgagccgagattgcgccactgcactccagcctgggtgacagagcgagactccgtctcaaaaaaaaaaaattatttgatatttttacagtgactcccaaaattttttttttaagacagactcttgctctgtcgcccaggctggagtgcagtggcatgatctcagctgacaacaacctcggcctcccaggttcaagccattctcttttctctgcctcccgagtacctaggactacagacattcgccatcacacccagctaatttttgtatttttaggagagatggggtttccccattttgtccaagctggtcttcaactcctgacctcaagtgatctgcccccctcagcctcccctagtccccacacaatctgggagagatgccacactgcgggtgcagagtcacctggagagggctccaggccagggcacagtcactgagcagggaagagaaaggacggccgggagcccagctgtcagcatagcggccatcttatggctgaagggtactgaggctgagctgggcaaggagaactcggaaagcagattgtggagctgactatggggaggcctgggtcctgccacagccattttcctgccaagggaggctgtgactgagcgggctacccagcctgggaaactgctttttccatggaactgtgcaacccacagttcagaagattccacttgtgaacccttgccactggagcctgagatctgaaccctggaggtgagcaattctcaacagcctctctcctagaatctgcttaagcctgccaagatcccgggggaggggtgtggggaaaagagagatcagactgctactgtgtctatgtagaaagaagtagacatgagactccattttgttctgtactaagagaaattcttctgccttgagatgctgttaatctgtaaccctagccccaaccctatgcttcctgagacatgtgctgtgttgactcaaggtttaatggatttagggctatgcaggatgagctttgttaaaaaagtgcttaaaggcagtatgcttgttaaaagtcatcaccattctctaatctcgagtacccagggacacaatacactatggaagttggcagggatctctgcctaggaaagtcaggtattgtccaaggtttctcctcatataatagcctgagttattgcctcatgggaagggaaagacctgaccatcccccagcctgacccccataaagggtctgtgctgaggaggattagtaaaagaggaaggcctctttgcagttgagacaagaggaaggcatctgtctcctgcttgtccctgggaatggaatgtcttggtgtaaaacctgatcacacattctatttactgagataggagaaaactgccttatggctggaggtgagatgtgctggcggcagtactgctccttaatgcactgagatgtttgtgtaaagtcaaacataaatctggcctacgtgcacatcaacgcacagtgtctttccttaacttatttatgacacagagatcttttctcacgtgttttcctgctgaccctcttcccaccattaccctatagtcctgccacatccccctctctgagatggtagagatagtgatcaataaatactgagggaactcagagaccagtgccagcgcgggtcctctgtatgttgagtgccggtcccctgggcccactgttctttctctatactttgtctctgtgtcttatttcttttctcagtctctcatcccacttgatgagaaacacccacaggtttggaggggcaggacaccccttcatctggtgcccaatgtgggtgcttttctttaggttgaaggtatgccagagcgtggtcattgaggacaagttgatgagagattcccgagtacatctatggtcagccttgcggtaagcttgtgcgctcagaagaacctagggtaacaatgggataaactgaaagtaaatatgcctcttagctttattaaaattcttttaagaagagggggagttagagtctctacagaaaatctaatcacgctacttcaaacaatagaacaattctgcccatggtttccagaacagggaactttagatctaaaagattgggaaaaaattggcaaagaattaaacaagcaagtagggagggtaaaatcatcccacttacagtatggaatgattgggcccttattaaagcagctttagaactgtttcaaacaggagaagatagtttcagtttctgatgcccctgaaagctgtgtaatagattgtgaagaagaggcagggatagaatcctagaaaggaacggaaagttcacattgtaaatatgtagcagagtctgtaatgactcagtcaatgcaaaatgttgactacagtcaattacaggaggtaatatatcctgaaacattagaattagaagaaaaaggtccagaattagtggggccatcagagtctaaaccatgatggccaactcctcttccagcagttcagatgcctgtaacattacaacctcaaatgcaggttagacaagtacaaacctgaagagaataacaaatagagaaagatagagtatctgtcacagcaatgccaatccaaatacagtatccacaatatcagctggtagaaaataagacccaactgccagtagcctatcaatactggccgccagccgaacttcagtattggccgcccctagaaaatcagcatggacagccaggaatgtttccagcaccacagggcagggcactatatccgcagcctcccactatgagacttaatcctacatcaccacctagtagacagggtggtgcattacataaaattattaaagcaagaaaacaaggagatatcgaggcgtggcagttcccagtaatattagagccgataccacctgaagaaggggcccaagagggagagcctcccctagctgaggccagatatgagtccttttctataaaaatgctaaaagatgtgaaagagggagtaaaaagtatggactcaactccccttatttgaggacattattaaattccattgctcatggacatagactcattccttttgattgggagattttggccaaatcatcactctcaccctctatcttttacaatttaagactttgtggattgatggggtacaagaacaggtccaaaaaaatagggctgccaatcctccagttaacataaatgcagatcaactattaggaacaggtcaaaattggagcactactaatcaacaagcaataatgcaaaatgaggccattgagcaagttagagctatctgccttagggcctgggaaaaaaatccaagacccaggaaccacttgcccctcattcagtactataagacaaggctctaaagagccctaccctgattttgtggcaaggctccaagatgctgctcaaaagtcaattaccggtgaaaatgcccataaggtcatagtggagttgatggcatatgaaaacaccaatcctgagtgtcaatcagccattaagccattaaaaggaaaagtcccagcaggatcagatgtaatctcagagtatgtaaaatcctgtgatggaattggaggagctatgcataaagctatgcttatggctcaagcagtaatgggagttgctttaggaggacaatatttgggggaaatattataattgtggtcaaattggtcatgtaagaaagaattgcccagtctcaaataaacaaaatataacaactcaagctactacaacaacagataaagagccacctggcctatgtccaagatgtaaaaaaggaaaacattgggctaatcaatgtcattctaaagttgataaaaatgggcaaccattgtcgggaaatgagaagaggggccagcctcaggccccgcaaaaaacggggcgttcccagttcagccctttgttcctcagggttttcagggtcaacaatgcccactgtcacaagtgcctcagggaatgagccagttaccacaatacaacaattgttccccaccacaagtggcagtgcagcagtagatttatgtaccatacaagcagtctctctgcttccaggggagcccccacaaaaaaatccccacaggggtatatggcccactgcctgaggggactgtaggactaatcttaggaagatcaagtctaaatctaaagggagttcaaattcatactggtgtggttgattcagactaccaaggcgaaattcaattggttattagcccttcaattccttggagtgccagtccaggagacagaattgctcaattattactcctgccttatattaaggttggaaatagtgagataaaaagaacaagagggttgggaagcactgatccaacaggaaaggctgcatattgggcaagtcaggtctcagagagcggaccggtgtgtaaggccattattcaaagaaaatagtttgaagggttagtagacactggagcagatgtctctatcattgctttaaatcagtggccaaaaaattggcctaaacaaaagactgttacaggactcatcggcgtaggcacagcctcagaagtgtatcaaagtactatgattttacattgtttagggtcagataatcaagaacgtactgttcagccaatgattacttcggttcctgttaatctgtggggttgagatttattacaacactgggatgcagaaatcactatgcccactccattatacagccccatgaatcaaaaaatcatgactaagatgggatatgtaccaggagagggactaggaaaaaatgaaaatggcatgaaagtcccaattgagactgagagaaatcaagaaagaaaaggaatagggtatccttcttaggggtggccactgtagaacctcctaaacccattccattaacttggaaaacagaaaaactggtatgagtaaatcagtggccactaccaaaacaaaaactggaggctttgcatttattagcaaaggaacaattagaaaagggacatactgagccttcattctctccttggaattctcctgtgtttgtaattcagaaaaaatctggcagatggcatatgttaactgacttaagagccataaatgccataattcaacccatggggcctctccaacctgcattgccctctccggccatgatcccaaaagactggcctttaattataattgatctgaaagatcgcttttttaccattcctctggcagagcaggattgtgaaaaatttgcctttactataccagccataaatagtaaagaactagccaccaggttgcagtggaaagtgttacctcagggaatgcttaatagtccaactatttgtcagaatttcataggtcaaactcttcaaccagttagagacaagttttcagactgttatatcattcattatgttgatgatattttatgtgctgtagaaacgagagacagattaatttattgttatacatttctgcaagcagaggttgccaacacaggactgacaataacatctgataagattcaaacctctactccttttcattatttagggatgcagatagaaaatagaaaaattaagccacaagaaatagaaataagaaaagacacattaaaaacattaaatgactttcaaaaattgctaggagatattaattggatttggccaactctaggcattcctacttatggcatgtcaaatttgttttctatcttaagaggagacccagacttaaacagtaaaagaatattaaccccagaggcaacaaaagaaattaaattagtgaaagaaaaagttcagttgcacaaataaatagaatagatcccttagccccactccagcttttgatttttgctactgcacattctccaacaggcatcattgttcaaaatactgatcttgtggaggggtcattccttccccacagtacaattaagacttttacattgtacttggatcaaatagctacattaattggtcaggcaagattacaaataataaaattgtgtggaaatacccagacaaaatggttgtccctttaaacaaggaacaagttagacaagcctttatcaattctggtgcatggcagattggtcttgctgattttgttggaattattgatcatcattacacaaaaacaaaaatcttccagtttttaaaactgactacttggattttacctaaaattaccagacataaacctttagaaaatgctctgacagtgtttgctgatggttccagcaatggaaaggcagcttacacagggccaaaagagtgagtaatcaaaactcagtatcaatcggctcaaagagctgagttggttgtagtcattatagtgttacaagattttaatcaacctattaatattgtatcagattctgcatatgtagtacaggctacaaggggtgttgagatagctctaattaaatatagcctggatgatcagttaaaccagctgttcaatttattacaacaaactgtaagaaaaagaaatttcccatttatattactcatatttgagcacacactaatttaccagggcctttaactaaagcaaatgaacaagctgacttcctagtatcatctgcattcataaaagcacaagcactttgtgctttgactcatgtaaatacagcaggattaaaaaacaaatttgatgtcacatggaaacaggcaaaaaatactgtatgacattgcacccagtgtcaagtcctacacctgcccactcaagaggcaggagttaatcccagaggtctctgtcctaatgcgttatggcaaatggatgtcacacatgtaccttcatttggaagattatcatgtgttcatgtaacggttgatacttattcacatttcataagggcaacctgccagacaggaaacagtacttcccatgttaaaaaacatttattgccaggcgcggtggctcatgcctgtaatcccagtactttcgaaggccaaggcgggtgaatcacctgaggtcaggagttcgagaccagcctcaacatggagaaactctgtctgtactaaaaatacaaaattagccaggtgtggtggtacatgcctgtaatcccagctacttgggaggctgaggcaggagaattgcttgaacctgggaggcagaggttgcggtgagccgagatcgtgccattgcactccagcctgggcaacaagagtgaaactccgtctcaaaaaaaaaaaaaaaaaaattattatcttgttttgctgtaatgggaattccaaaaaaaaaaaaaaaaaaaaaaattaaaactgacagtgggccagaatactgtttttaagctttccaaaaattcttaaatcagtggaaaattatacatacaacaggaattccctataattcccaaggataggccatagttgaaagaagaaatagaacactcaaaactcaattggttaaacaaaaagaagggggagacagtaaggagtgtaccactcctcagatgcaacttaatctagcattctatacttcaaattttttaaacatttatagaaatcagactactacttctgcagaacaacatcttactggtaaaaagaatagcccacatgaaggaaaactgatttgatggaaagacaacaaaaataagacatgggaaatagggaaggtggtaacgtgggggagaggttttgcttgtgtttcaccaggagaaaatcagcttcctgtttggatacccactagacatttgattctacaatgaacccatcggagatgcaaaggaaagcacctccacggagacggaaacaccgcaattgaacaccattgactcataagatgaagaaaaaggtcatgtcagaagaacagatgaagttgccatccaccaagaagacagagccgccgacttgggcacaattaaagaaggtgacaccgttagctaaaaaaaagcctggagaacacaaaggtgacacaaactccaaagggtatgctgcttgcagctttgatgattgtatcaatggtggtaagtctccccattcctgcaggagcagctgtggctaattatacctactgggcctgtgtgcttttcccgcccttaattcaggcagtcacctggatggataatcctattgaagtatatgttaataatggtgtatgggtacatggccctacagatgatcgttgccctgccaaacccaaggaagaaggaatgatgataaatatctccactggatatcgttatcctcctatttgcctagggagagcactaggatgtttaatgcctgcaatccaaaattggttggtacaagtacctactgtcagtaccatcagtagattcacttatcacatggtaaggggaatgtcactcaggccatgggtaaattatttacaggacttttcttatcaaaggtcattaaaatttaggcctaaagggaaacattgccccaaggaaattcccaaaggatcaaaagacatagaagttttagtttgggaagaatgtgtggccaagagtgcagtgatattacaaaatgatgaattcagaactattatagattgggcaactcaaggtcaattctaacacaattgcacaggacaaactcaatcatgtcccagtgcacaagtgagtccagctgttgatagtgacttaacaggaagtttagacgaacataagcataaaaaattacagtctttctacacttgggaatggggagaaaaaggaatctctactttgattggacttcagcgaagactccaagatggcaatcgccacctcggataccctaactcagcatttccgggttcacctttcctgttcccaccaccccgactaacgcacatgcccactagggcgtgtcacactcagaagtgtgaaactcaaccgatcccgcccctaccccgaccactcctcacccagcatccataaaagcgcgctgcacctttcgcacagcgtgacttcccctggcggaccagtgaacctcaccggagagctcaataaagaagatttttgccctctttgtcttgcctcttggccttattgatccacggtgcctttccattgcctttcatactccaagaccaaaaataataagtcctgtttctggtcctgaacatccagaattacagaggcttactgtagcctcataccacattagaatttggtctggaaatcaaactgtagaaacaagagatcgtaagccattttatactatcgacctaaattccagtctaacagctcctttacaaagttgtgtaaagcccccttatatgctagttgtaggaaatatagttattaaaccagacccccaaactataacctgtgaaaattgcagattgtttactagcattgattcaacttttaattggcagcaccgtattctgctagtgagagcaagagaaggtgtgtggatccctgtgtccatggaccgactgcgggtggcctcgccatccgtctgtattttgactgaggtattaaaagacattttaaatagatccaaaagattcatttttactttaattgcagtgattatggggtggcaaaagaattctacaagattgtggaattcacaatctggtattgatcaaaaattagcaaatcaaattaatgattttagacaaactgtcatttggatgggagataggcttatgagcttagaacatcatttccagttacagtgtgaatggaatacttcagatttttgtattacaccccgagtttataatgagtctgagcatcactgggacatggttagacgccatctacaaggaaaagaagataatctcactttagacatttccaaattaaaagaacaaatttttgaagcatcaaaagcccatttaaatttggtaccgggaactgaggcaatcatgggagttgctgactgcctctcaaatcttaaccctgtcacttgggttaagaccatcagaagtactactattataaatttcatattaatccttgtgtgcctgttctgtctgttgttagtctgcaggtgtacccagcagctccaaagagacagggaccatcaagaacgggccatgataacgatggtggttttgtcaaaaataaaagggggaagtgtggggaaaagaaagagagatgagactgttactatgtctatgtagaaagaagtagacataagagactccattttgttctgtactaagagaaattcttctgccttgagatgctgttaatctgtaaccctagcctcaaccctgtccttgcagagacaagtgctgtgttgattcaaggtttaatggatttagggctgtgcaggattactttgttaaacaagtgcttgaaggcagcatgcttgttgaaagtcatcaccattctctaatctgaagtacccagggacacaatacactgcggaagcccgcagggatccctgcctaggaaagccaggtattgtccaagggttctccccatgtgatagtctgaaatatggccttgtgggaagggaaagacttgaccatcccccagcccgacacccataaagggtctgtgccgaggaggattagtaaaagaggaaggcctctttgcagttgagataagaggaaggcatctgtccctgggcaatggaatgtcttggtgtaaaacccaatggtatattgtatttactgagataggagaaaaccgccttagggctggaggtgagacgtgctagcggcaatactcctcttcaatgcaccaagatgtttatatacgtgcacatcaaggcacagcatctttccttaaaattatttatgacacagagacctttgttcacatgttttcctgctgaccctctccccaccattaccctattgtcctgccacatcccctctccaagatgatagagataatgatcaataaatactgagggaagtcagagaccagtgctggcgcaggtcctccatatgttgagtgccagtcccctgggcccacttttctttctctatactttgtctctgtgtctctttcttttctcagtctcttgtcccacctaacgagaaacacccacaggtgtggaggggctggccacccctttagctgtgtgatagataagtaaaaacagcaccatctaattcataatgggaagggtgtttctttccataagctgttcctagagtacacaaaggatggagaattttaccaatcacaaatattttcctggattatctatccattttatatttccccatgtattttctttgttctatgcatttcttccatttggcttttcctggggtgcatcctatatattaaaccagtaaacataactacagtgtttttctgagttctgtgagtagctctaccaaattactgaacttcagggaggttttgggagtctccagttttcaaacagtgtgtcagaagtataaatgggcccatggggtttgtgactggcatctgcagtgaggacaaggttgtgggactgagccctgaatcagggtctgtgctgactctgggtggtgtcagaattcaaatgtaagacaatgagctggtgttgaagaattgtttgatgttcagcaaactacagattttgtgccagaaaaagcatatcatggaggcctggcctggaacaaaactctgagtgtctgggaatgggaggctctgctctcctgcacacaggctgtcacgctgcccgttgtcctgtgattccagctcttctcccagggtgacagaggactgaaacttacaggaaaggagctctgatgacagaccccttttctttcaactgcatccacaggattcccactcactcacaaacatacatactagacattgatgtgtccgcactcctcccaggactaggcaccaccctcaggaacttcaccatggcatttttgatccaaatgtttcttgccaagaactcacaagtgtctacaagtctcctgtcatatcctcactcccagacattgagccttgagcagcaacctgttttctccaccaacctaaggttctggacctcctgtttataatctcatctgcctgcattcacacagaaataaatcagagtacagccccacctgggccactagctgcagtgaaaatcagtccattcacctacattgcactctatcccatgcagggattttgtttttttcttttagcttttatttttggttctgtgtacacatgtgggatatacagctaaaattatgtcatgggggtttggtgtgcagattattttgtcactgaggtactacccgtagcaccaaacaggtctgttttctcatcctcttagtcctcccaccgtctaccctcatctaggcctcagtgtctgttgttctcctctttgtgtttttgtgttcttattacttaactcttacttataaataataacatgcatttggttttcactttctgcattagttttcttttatgtttttgttttgttttgatttttgagacagagttttgctcttgttacccgggctagagtgcgatagtgcaatcttgacttactgcaaccttagcctcccaggttcaagcaattctcgtgcctcagcctcttaagttgctgggattacaggtgcatgccactacccctggctaattttgtatttttagtaaagacagggtttttccatgttagtcaggctggtcttaaactcccaacctcaggtgattaccccgcctcggcctcccaaagtgctgggattacaggtgtgagccaccgctcccagcctctgaattagttttctgagaataatggtctctagcttcattgatgttattggaaaggacatgatcgttttgttttttaatagacacagagttttccatgatgtttatgtaccatattttgtttttactaaatcttttattttattttacttttttgaggtagggtctcgcttattgcccaggctacagtgtcatggcatgatattggcttacttcagggtcaagcaattctctcctatctcatcctcacaagtagctgtgagttcacatgtgcgttaccacgtctggccaatttttctttttttttttttgaggtggagtttcactctgttgcactccgttggagtgcagtgatgcgatctcggctcactgcaagccccgcctcccgggttcatgacattctcctgcttcagcctccagagtagctgggactacaggctcccgccaccacgcccagctaattttttgtatttttagtagaaacggggtttcaccgtgttagcgaggatggtcttgatcgcctgacctcgtgatctgcctgccttggcctcccaaagtgctgggatgacaggcatgagccactgcgcctgatcaatttttctttttgtattttccgtggacacaggattttgccatgttgcccaggctggtctcaaacttctaagctctggcaatccacctgccttggcctcccaaagtactgggattacaggcatgagccaccagatctgaccataccatattttctttatccaatctactactcataggcatttagggcctgtccttatctttgctattgtgaatagtgctgcagtgaacatgcatgtggatgtgtctttataatataataatttatatttctttggttatatacccaattataagattcctgggtcaaatgataattctgtttttagttctgtgaggaatcaccacactgctttttacagttgttgaactaatttacactccctccagcagagtataagcattcccttttctctgcaaccttgccagcatctgttatttattgactttttaaaaatagccattctgactggtgtgaggtggtgtctcattgtggtttttttaaaaaaaattttctctaatgattagcaatgagcatttttttccatatgcttgttagccacatatgtatcttcttttgaaaagcatctgttcatgtattttgcctactttttaatgaggttgtttaggtttttcttttaaacttatttaagtttctaataaattctggagattagacctttgtcagaggcaaaacttgcaaatattttcttttattctgtaggttgtctttttcctctgttgatggtttcctttgctgtgaagaagggttttagtttaaataggtcccatttgtcaatttttgcttttgttgcaattgcttttagtagcttcatcatgaagtctttgccggtttctgtgtctagaatagtgtttcttaggttatcatgcagggtttcttataattttaagtttacatttaagtgtttaatttatcttgagttgatttttgtatatggtgtaatgaaggaatctagtttcagtcttctacatagtgctaggtagttattccagcaccatttattaaatagagaattcttgctacattcctcttgtcagctttgtcaaaaatctgatggttgtaggaaggtggcattatttctgtgctctctattctgttgcattggtcttgtgcactcatggatttttttataacatctttgtctcttcttttttttttttttttgagacagagtttcgctctgtcgcttaggcagagtgcagtggcgcgatctcggctcactgcaagctccgcttcccgggttcacgccattctcctgcctcagcctcccgagtagctgggactacaggccacagcgcccggctaattttttgtatttttagtagaggcggggtttcaccgtgtcagccaagatagtctcgatctcctgacctcttgatccacccacctcggcctcccaaagtgctgggattacaggcgtgatccaccgcgcccggcctcttctcctttttctccataaccattctttgaagtgcatacagtgttcaaaattcagatgcccaagagttcaaaaactctttaaaaagtttgaaaacaaattttgctattctctctgcttttaagggattcagattatatgcagatatttttctctgcttttttgaaatatatgcaagcgatattaacagctaaataaatcttttgttattttttatgactccagattttctttttctggtacttcagatttattgctttgttttagcttctgaaaagtttatttttttcatttttagtcctttaaagtagacacagatttgtttagataaaagctaatttaagagcacacagaagcttagcacaaagataaaattaaatttagcaatacagaatgataaacactaaaagatactaaatttttttgacagaaacctgattatccaaggaaattatccaatatttgcagactgaagtacttatactggaaaaacaagaacagttcagtgcataaactgaacagtggagtctgtagttgtaccttgctttcaatttattacttcagaacaattagcatcattatgtgtagtgtttgtagacaacctgcattcatataaataaaacagtattttctttttttcagacagagtctcactctgttgcccaggctggagtgtagtggcataatataaagccctaccatcttggtcaggctggtctcaaactcctgatgtcatgatctaccaacgttattcttccaaagtgctaggattacaagtgtgagccaccacatctggccatataatttctacttcttttactttactaagtgtacatatttattttctaataaaattacctaagaaaggctgggcattgttgctcatgtctgtaatcctcgcactttgtgggactgaggcaggtggatcacaaggtcaagagttcgagaccagcctggccaatatagtgaaatgctgtctctactaataatacaaaaatttgccgtgtgtgttggtgcacacctgtagttccagctacttgggaggctgaggcagaagaatcacttgaaccctggaggcagaggttgtagtgagccgagatggcaccactgcactccagcctgtgcaacagagtgagactccatctcaaaataaaataaaaagccataaaaaaccctagcaaagcttaaaggatttgtttaaactgtgtattagtatgtagtataaatttgacagggcagtggctagaaaatattaaaattacagaaactctgggatttaagtttttttttttttttttggtaagcttagaaaaaacaaaactactagtactgcagtggcatagacaccagaattctatgtagggttgccaccttgccgcagatctgttcagattcaccctttttggaggacttatttagttctgatcctaccttggagtcctgcctcagataactgattagaagagatcagagttttggctggtgaatcctgttgcctttctagagctggtgcttacaatttcctgaaagccaaaagctgataaatgggataaataaggtatatattttagggtgctactatttaaatgttctattaaaaccagtgcttgcagagacattgtatttagaaacttgttttctatttctgcagatacagtacttgctccataagtcacaaaaaagtaaatataaacagaataaaatcgtgtctaaactacattaacctctttttatatctgtttcatctgcctatatttagcttttattctttataattttttaaaaaatttgatgacagagaaacacaagaagaaataaaaatgctgggccctttatctaaatcctggaaattattaaacccttagtaccagctcccatggtgttatgagaattaaatcacataatgtgttatgcccagcacagtgctctgtatcacactcttgagcacatagtacctgcttaataaacattgcattagtacatgtgtacatgttgttttttaaatccagacttattcagacattgctgcattctgtttcctctgtaaactttaaagagccagcaaagaatataaaactttaacatggagatggattgttcttgtttgtaccagaagtatttggttgcaacaagagtgctgagtgtaagggaccctgtgctgtgcctgcttctgtaactaatggtaataatgaaccaatggggagcaacaccagcatttataggggattgtttaaaacacccattcatggacgcttttcaaacctgcagaatcacattacataaagtggggccaaaattaccaagtgatttataggctctttaaagcttgagaggcaataattagcttagggattatcagcccaggcttctcattaggatcaaatggccaatttgcagaaatctcttgtgccctccccacagcttctgtttattgttctgggtggaagcatccatgttgttttaatgaagggcctcatgtgaatctgaggtgagaccagaatctggtatgaggatttcaaaatacattcatgagagttaagttccacctttggactaaagggtggtcacagggcctgttctctttgggtttagtagggacaggtcagtgtggtgcatatttccattactgtagcagaaattgctggtgtctgtggcaggggagggcacctcaggacaggaaaggagaaacttatattttcatcttcatggagcagctcattgtttctgaatctcttctgttttaaaggacagaaatgggtggatttttctgtctttttctgctggttgatgttacgctagctggtaaacatgtggcactgacacctttaaaggcatattctcaagatgcaggggtaatttttttagagaatctcatctgagaaggaattccagagaagtaggagatagaaaaaacaaaaaaggcttttcttcaggtaaacatgcctcagctgaaatgctgtgtccactctgcctcctggaatgccatgcatttagtacttgcaaacttttatttctctacttgtgtttttccttcctaagtagtttggtttaagtacttcttaaaattcttatgatagtcaagggtctctgaaaaatgtttctttcctgtatcccagagccttctcttctttctctacacaataacttcttatatgccatgcagatttttcaacaagtattcatgatttgcaatattaaaaatgttccctttctggctgttgaacatggaaagatgtggatactcaagatttctattggggaaaactgtggtccttagtaaagatggagaacatgtaaagttgaggctctattcctgtgttccattagctgtatgcagaacaggattaagaaattgcttatatatgtcaggtgtggtggctcatgcctgtaatcccagcactttgggaagtcgaggtgggaaggccacctgagatcaggagtttgagaccagtctggccaccatggtggaaccctgtctctactaaaaatacaaaaattagccaggcttgttggcaggtgcctgtaatcccagctactcatgaggctgaggcaggagaaccacctgaacccaggaggtggaagttgcagtcagccaagattgcaccattgcactccagcctgggggacaagagtgagacttcatctcaaaaaaaaaaaaaaaaaaaattgctcatttaaatgtgatggcatttattactcagaaatttctgaaaaaaattattaggagatacctgctctctagggtgctaaatgaagccgacttaaaattactactaaaaattacagagcataggatttatctgtattttgtggtttccataaaacaaatgattctttatgattaaattcagattttacttacttttttaaaagaggaatatttcaacagtgatgctgtgttctgtgtgcattagcacatcataaaaattagtcctaatgcagttaatgattcacttgcttaaatagccctctggcagattttttcactatgtagctagttatttttctcttcattattaagtatgtttatgcagctgatgtgcataaaccatcacatttaatctggcagctgtccttttttcttatttttatctatatatttttctttggaaaatgaaggttcttatctttgtttacaggtcagaaaaactgggaaaaacacaggctcttccacttactggctgtttgacaaaatatcctccttctttggccaaaaacattgacattattgatgagcttgttagaaattcaaaaaatcagactttattccagatcttctggaaaaaaaaaccctgtataacaaggtattcagcttattgcacatattaaaatttgagaagtgtcttctaactcaacatgtcattttcatctgaaaaatattcacaactctttccatatgatgtaaatatagcactcaaaaatgtacctgttcatgttcatgcccttaaatttatactttattatctagaaaaatatatgaactgatgttgtggatcttatgcttctcttttttctcagagttagagaatattttggagagtatttctgtgttgaaaattattttattggataattttcatcagtactataagtcagaaccaggtgtctttactctctcatttcaccttaagtcaaattaaaaatttcattcatggtcacttggtgaaaatgtgtgtgtgtatttttcagaggacattacaattcagagatgtggccatagaattctctctggaggagtggcattgcctggacacagcacagcggaatttatatagggatgtgatgttagagaactacagaaacttggtcttccttggtgaggacaacttgaatatataattcataatatacacaaaaggtttatttctcttttttgtagaatgtgttttagtaatttgttctttttataaatgagtttcagatccagtttttcaagaaaatcttcagaatttgtgcatttagaaaagaattacttccgtgcctcatgcctgtaatcccagcactttgggaggctgaggcgggggattacctgaggccaggagcttgagaccagcctggccaactaacgaaagtacaaaaaattagctgggggctgtggcacacacctgtaaccccagctacttaggagggtgaggcaggagaatcgcttgaacccaagaggcagaggttgcagtgagttgagatcatgccattacactccagcctgggtgacagagcaagtttccatctcaaggaaaaaaaaaaaagaaaaaaatttcttcaacatgtttcatctaaatataaactttccacatttctgagttgagttgtatttttcactctaaattagtggtaattccagaaatttattgacataaaatattgcaacctccctctcccctctcccctctgcctctctttccacggtctccctctgatgccgagccgaagctggactgtactgctgccatatcggctcactgcaacctccctgcctgattctcctgcctcagcctgcctagtgcctgcgagcgccgccacgcctgactggttttcgtacttttttggtggagacggggtttcactgtgttggccgggctcgtctccagcttctaaccgcgagtgatccaccagcctcggcctcccgaggtgccaggattgcaggcggagtctcgttcactcagtgctcaatggtgcccaggctggggtgcagtggcgtgatctcagctggctacaacctccacctcccagccgcctgccttggcctcccaaagtaccgagattgcagcctctgcccggccgccacccagtctgggaagtgaggagcgtctctgcctggccacccatcatctgggatgtgaggagcccctctgcctggctgcccagtcggaaagtgaggagcgtctctgcccagccgccatcctgtctaggaagtgaggagcgtctctgcctggctgcccatcgtctgggatgaagtgaggagcatctctgcccggctgcccatcgtctgagatgtggggagtgcctctgccccgccgccccgtctgggatgtgaggagcgcctctgccccgccgccccgtctgggatgtgaggagtgcctctgcccggccgcgaccccgtctgggaggtgaggagcatctctgcccggccgccccatctgagaagtgaggagaccctccgcccggcaggggccccgtccgggagggaggtggggggggtcagccccccgcccggccagccgccccgtcctggaggtgaggggcgcctctgcccggcggtccctactgggaagtgaggagcccctctgcccggccaccaccccgtctgggaagtgtacccaccagctcattgagaacgggccatgatgacaatggcagttttgtggaatagaaaagggggaaaggtggggaaaagattgagaaatcggatggttgctgtgtctgtgtagaaagaggtagacatgggacacttttcattttgttctgtactaagaaaaattcttctgccttgggatcctgttgacctatgaccttacccccacccctgtgctctctgaaacaggtgctgtgtccactcagggttaaatggattaagggcggtgcaagatgtgctttgttaaacagatgcttgaaggcagcatgctcgttaagagtcatcaccactccctaatctcaagtacccagggacacaaacactgcggaaggccgcagggtcctctgcctaggaaaaccagagacctttgttcacttgtttatctgctgaccttccctccactattgtcctatgaccctgccaaatccccctctgcgagaaacacccaagaatgatcaatacaaaaaaaaataaataaaaaataaaaataaataaaagattaaaacacacacacacacaaaaatattgcagcttccacctgaaaatctaattgccaccaccaatttttgattcagtagtaccaggcagtaaaattaagaaacctacaaattgaaagtattttcttttttttttttttgagatggagtcttgctctgttgcccaggctggagtgcagtggtgcaatcttgggttactgcaacatccacttcccaggttcaagcaattctcctgcctcagcctcccgagtatctgggactacagatgcacatcaccatgctgggctaatttttgtatttttagtagagatggggtttctccatgctggccaggctggtctcaaactcctgaccttgtgatctacctgtcttggcctcccagaatgctgggattacaggcatgagccactgcaccaggcaaattgaaaatattttctaaatatttagaaattgctgttataaatttgtattttggtattaatttaccagaatattttgtcacatcgtctttgctgagcacattactagcttgtaattggagaatatgagcaagattcatgttatttatttttgataaaacaggtattgttgtcttaaagccagacctcatcacccatctggagcaaggaaaaaaacctttgactatgaagagacatgagatggtagccaacccctcaggtaggtgtgagtgaaaatgaatacaacagatgacacaggtaagaggtcccaaggtgaaagagaaagccagtccttaaagtgtgattcaggaagctgtgttccaaagaaatacttcctgggcagctgttttatttatttatttatttattttttaaattttgctctcacaaaggggcatcttctgtcttatgcttttaaattctctaaaaattctacttttctttcagtgagcttccttcaagttcacagtgagagccaaagtcctcttcatggcatataagagactgcacaatctggctgctttttcattgttttggggacacacaaatatctgcatgattttgagaaactaaaactattttttagttctctttttgcatcaggtctgaaatatgtgagagtagtagtttctgttgcatttttttgttcatttttgttcacagtccattctatttttattatgacacagtcttgaaatatagtttgaaattttaagtatgatatccttctgctttgttctttttcctcaagattgctttggctattcaaagtttgttttagtttcatgtaaattttagaattgtcttttccattactgtaaaaaaaaccactgcaattttgatgggaagtttattgaatctatagatcactttggataatatgaaactttaatgatattctttcaatccgtagacataaatattttaaaattaattttgatcttctaatttttttatttttttactgtaaacattttttacctccttggttaatgtttttctcagaaatttgttatttaatgctacattaaataagattttttcttccttatcagatagtttgttttaagtatatgaaaccatacatatacttgtgtgttaattttatattttgctaatttactgagtttatttattagtttagacaggttttaatgtactgtttatggttttttaaatataggattctatgatctacaaacagcaactgttgacctatgtttcttcatctgaagaaatccataattttagattcagatatttaggacaatatgctagaatgttcatggtatgcctgaagtaaattagataatttgtagggacccatatttactaaactagttacttatgcatttaagtttgctgcaggcaaaaaggaattataggatttttatttatttatttatttatttatttgtttgtttattttcttttgagtggggctttcactctttttgcccaggctaaagggcaatggcgtgattttggttcactgcaaccttcacctcttgggttcaagcggctctcctgcctcagcctcccgagtagctgggattagaggtgctcaccaaaacacccagctaattttttgtatttttttggtagagatggggtttcaacatgttggcaaggcttgtctcaaactcctgacctcagatgatctgcccacctctgcctcccaaagtgttgggattacagccatgagccaatgtgcccggctggattttttcatttctgtgaatactggtacaatacgcatggattttcagttatgtcttccaggtcctgtgttgcatattttgtttttttgttattgttgttttcttttcttttcttttctttttgagctggagtctcactctgttgtccaggctaaagtgcagtggtgtgatcttggctcactgcaacctctgccttctgggctaaagtgattctcttacctcagccttccaagcagctgggattacaggtgcatgtcacatcaccaagctaatttttatatttttagtgaaatggtatttcaccattttggccaggctggtctcaaacctctgacctcaagttatctgcccatatcaggctcccaaagtgctagaattacaggcttaagccactgcacctggcctgtgttacatagtttagatatagatttataaatgaggaacatttataacattttaaaataatggctgcgtctttgttttccaccagcaatcaacattggttttatttttattgcacctaatgggtgtgaggtgattttgttggcattgtgcttttttttgatttctctacaaattagtaattttgtatgttctttcaaatgtttttttcccttttgtgcattttatgtcttgtatttagtttaaaatatattattgtatcattcaaggaaataatccaactttattttatcagtgttgacattcagttttcaacatcattttttgaagagattatttctatttcatatgcatggcaactttctggaagattatgtgatcatatacagaagggtttatttctgggctctctattctgttctttcatctgtttgtctttgtgtcagtatcacttttttatgttactgtaggttttaactgtaggttgtattgacatctttgaaaaataaaatattttgcccctgagcaagaatatgttgaagagtgtgtttcatattcacatatttgtgaatttgccagtttgacttttgcttttaattcttaatttcattcagtttttgttagaaaacacacagtgtataattttagtgtttctaaagtgattggttgttgttttgagacaagatcttactgtcacagtggcataattgtggctcactgtagcctcagactcctgggctcaagtgattctttcttttttttaaattttttaaatttttttattacactttaagttttagggtacatgtgcacaatgtgcaggttagttatatatgtatacatgtgccatgctggtgtgctgcacccattaactcatcatttagcattaggtatatctcctaatactaaagtgattctttcacctcagttttttgagtaggtaggactgtagacatgcactaccatgtctggctaattgtttacttgtttgtagtgttaggatctcactatgatgcccaggctgttctcaaacttttggcctcaatggatctccaaagtgttaggattataggcaagagccatggcacccagtagatatttttaaatttaataaaacttggtatatgtcctaacagaatacaccagaagcaaataagaatattgtatattatcttggttttgactggagagttttgtatgtgtctttgaaccctagttggtctataatatggtttggatgtccatgttgtccaaacctcatgctgggatataaatcttcaatgttggatgtgggacctggtgggacttgtttgggtcatgagggtgaatttctcacgaatggcttggtacatactcttcataaccaaaaagtttacactctatcaattcaaataagagctggttcattaagagaacttggctccttcacctcacacttgctctgtctcttaccatgtaatatacccagttacactttaccttccaccatgattttaagcttcctgaaatcctcatcagaagcagatgctgacacacacttcttgtacagtctggtgagctgtgagtcaaataaacattttttctttataaattatgcactctcaactattcttctatatgtaaaataattaatatggtctataatgttatctcagctttctttttcttattttttatctgagttttctatttattattgcaaatggggtcttgatgtctacaatgattatgttgctatgtatgtcttgcttcacttttgtcaatatttgctttatatattttgaagccctgatgttatatacacatatacatagagatagataagtagtatagatccctgctaaatcaactcacttttgccataatataatatcaatcttttctcatggtagtacttgacttaaagcatattctgtctaatataattatgaccacctcactcaattgtggttactatcttcatggaatataactttttttcattctgttaatttcagcctatttgactcaatgttaaaatgatctctcataggcagcatagtgtatactttttgaaaaaccattcaggcattctatatctttttctttatataattttatttatatgttcatttatttattcattttatttaattttattttttgagatagagttttgttcttgttacccaggctggaatgcaatggtgcaatctcagctcactgcaacctttatttcccgggttcaagcaattctcctgcctcagcctcccaagtagctgggattacaggtgcatgccaccacacctggctaagtttttgtatttttagtagagatgtggtttaccatgatggccaggatcatcttgaactcctgacctcaggtaatctgcccacctcggcctcccaaagtgttgggattacaggtgtgagccacagcacccggcctcagaggcatgatcttggtcactacaactctgccattacagagtctcactctgtcacccaggctggagtgcagtggcatgatctcagctcactgcaacctctgcctcctgggtttaagcaattctctgtctcagcctcctgagtaactgagattacaggtgcctgccaccacacctgtctaattttttctgtttttagtggagatggagtttcaccatcttggccaggctgcttttgaacttctgacctcatgatcaacccatgtcagcctcccaaagtgctgggattactggcgtgagccattgcgcccaaccagcaatttacttttaaagacacaatattatactggagagcaggaagagctctgttgggtataagtaacagacttttctttttcttctatgtggctctttgcattgtgctcacctggggcccttcatccatttaacccatttataaattttttacaaatgtattttggtcagtatgtttttgttacctttatatgtccaggaagaaattacagcttgtggtattttgctatgtcatcttgcttatgtagtttgtataattttataggttagatttgtaaagtatatttatctgagtctagcaattgaagtaatgtgtttttattgtttctttcagttttgtgttctcattttacccaaaatctttggccagagcagagcataaaagattatttccaaaaactgatactgagaagatatgaaaaatgtggacatgagaatttacagttaaaagaaggctgtgaaagtgtagatgagtgtaaggcgcacaaaagaggttataatggacttaaccaatgtttgacaactacccagagcaaaatatttcaatgtgataaatatgggaaagtctttcatcaattttcaaattcaaacagacataagataagacatactggaaaaaacttttcaaatgtatagaatgtggcaaagctttcaaccagtcctcaaaccttactacacataagaaaattcatactggagagaaaccctacaaatgtgaagactgtggcaaagcctttaacttctcctctaaccttactacacataagaaaattcatactgaagagaaaccctacaaatgtgaagaatgtggcaaaaccttcagttggtcctctattcttattacacataaaatgattcatactggagagaaaccatacaagtgtgaacgatgtggcaaagcttttaaccattctgcaactttttttcgcataagaaaattcatattggagggaaaccatacaagtgcgataaatgtggcaaggcctttatttcatcctcaaaccttagtagacatgagataattcatatgggagagaaaccatacaaatgtgaaaatgtgcaaagcctttaagcactcctctacacttaccagacataagatagttcatactggagagaaaccctatgagtttgatgaatgtgggaaagcctttaaccagctatcaacttttactaaatatgagaatttatatggaacataaaccctacaaatataaagaatgtgacaaaacttttaggaagttctcaacccttattatacagaattcatactggacagaaatcctacaagtgtgaagaatggggcaaaacctataacaggttttcaattctttttggttttttttttgagatgaagtttcactcttgtcacccaagctggagtacaatgccacgatcttggctcactgcaacctccgcctcctgggttcaagccattctcctccctcagcttccctagtagctgagattacagctgcctaacactatgcccagctaatttatatatttttagtagagacacgattttgccatgtttgccaggctggccttgaactcctgacctctggtgatccacctgctttggcctcctatagtgctgggattataggcatgagccacgatgcccagccacaagttctcaattcttaggagacttggtgataattcatgctgaagaggaactctacaaacctaagaaatgtgactgacagagtttttaccaacacctccaacttctctatacataaaaataattatactagtgtgaaaacctagagatatataaaatgtgacaaagcctttatatggttgccacactcgattgtagttaagataattcatattggcaaaactcctacaagtgtgaaaaatgtggcaaaacttttcatccgttcttatactttatttcacaggaaagctagtatccttgagaaaaattgtacaactataaggaatatggaaaacccattaattcctactcacatcttactcaacataaaaaggttccttttaataaaagcattaaaagtgcaattacagtcaagaaatctttcagaaagtataagcatttaatgtgaagaagagtattgtgaagacaactattacaaatataaagggggttatagtacatttacttgtatcactgatcctattgcacacactttgcactagaggaaaaccttgaagcagttgctcaagctttgttcaacaacagggaatttatattggagatgagtcctgcaaatgtaataagcttagaaacacttattttttttttcagaaactacagcttagaaaacaccagagagtttataccaaaatataattttgcaaatgtggtaaatataaaaaactaattcaaaatagaatgtatttaaatatcagagaatttacagtagaataactaaggcactgacacttcagacattacactaaatcagagtgttgagtataaaaactaatccacaactacagtttttagataaatgatttgcatgtaactgtaaaaggagtagatttttggaagcattgtaattacattgaaagtatacttgtttccttgaataaaattttttgaaaactgcataatgatgtcatacagcttttaaattactttacgctgttattttactcttattcacatgtgaaaggacgtgataaattgcttctgcatcagagatattagagatttttgaaaattatttggacattatgactttttctataaaagagtaaggacattaaaatgtaagatgcataatgaaaatataagcggagaggctttttgtagtaaacctctattaagtaatgtataaggtaaatgttcagagcaatacttttctacattatagtgacataaataattatagttaaaagtatattaaaataaattagtatattattttactaattgtagttttatgtaataaaatgcagtacatctaacaattgttagggctgggctcaatggctcaaacctgtaatcccaccaatttggggggccaaggtgggcagatcacctgaggtcgggtgttcgagaccagcctgaccaacgtggagaaatcccgtctctagtaaaaatacaaaaaaattagccagccatggtggtgcatgtctgtaatcccagctactcaagaggttgaggcaggagaatcgcttgaaccagggaggcagaggttgtggtgagccgagatcatgccattgcacaccagcctgggcaacaagaacaaaactctgtctcaaaaaaaaaaaaatagttagattatgtgtgaactcaattttattattattttttaccatgttaatactattgtgcatttaatgaagcattattatgccactaactttaacctatcccaccttactcaagggtgtagctacaagatggtagcaacatactatttggtacatagtggaataacatctctagttatcactttgccagtggcattaaactgcaaaagagttaaagaatattgttcccatagattaaatttttactcttttttcttatcaaaatttgttattgtatttgtgggtatatagtatgtgtatgtatttatgccttatatggcatattttgattgaggcctacaatatgtagtaattacattagggtaaataaggtatccatcacctctagcgtttatcctttgtattaccaacagtataattatatgctttcattattttaaaatgtacaattaaattgttattgactacaggatttttttatggtcataataattatacaaaaatataaataaaatacagccaggtgcagtggctcatgcctgtaattccaacactttgggagaccgaggcaggtggagtacttgaggttaggagttcaagaccaggctggccaacatggcaaaaccccacctctactaaaaataaaaaattagccgggcatggtggcacatgcctggaggctgaggcaggagaatcgtttgaacgcgggagatggaggttgcagtgagccgagatcacgccactgcactccagcatgggtgacagagtgagactccatctcaaaaaaaaaaaaaaagaagaaatacaaataaagtccatacatttctgagtcctgaaaaataattaataaatatttgtcatatagttttctttgaacatgtggtctctctgcctgcaagcatatagacttttagttttaatttacatagagttaaatatactcatattactctgaagataaaccttaggtgtaagaaaaatataaagtgagtgtttttgtctgagtatgagtttgtacacattttcagaagcaaagagcaattattgcaacaaaggaaattattttaattaggtgactaactaaacaccttgaaaatgctgaaagcaaatctatactttctgctttgtattcagtttattaatgtaaactgttaaggcttatgattcagattctccccggaatctgcctattaaagcacagacaactttgtctccagaaacaacactcttgagtacaacaataaaacccctcttcaaacagaaaaaaaaataatttttaacaattacctttataaacattcaacaaaattaaataattggatatatttttattgttctgtgtgtgtgtgaatgtataaaatggtgcatacaggaaaaataagccagaagaaagatgttagttaatattcacagtgaataaaactggaaagtagttaattattaaatccagatgatagctttgtttatgtagataacaaaagcagcagaaagacttttttttttcccagatgaagtcttgctcagtcgcccaggctggagtgcagtggcatgatctcggctcactgcaacctccacctcttgggttcaagcaattctcatgcctcagccttttcagtagctgggattacagtccgtgccatcattcctgactaatttttgtagtttcagtagagacagggtttcatcatgttggccaggctggtctcaaactcctgacctcttgatatgcccacatcagcctcccacagtgctggtattacaggcatgaaccaccgtgaccggcaaaatactattttaaaagtttatttaggtggatagacaacattctaagataataccctggattctcagtctgttgcacacctgctgtgtaatactctcctcttgagtttaaaaacatgtgtgactgtggtgggaaatcattcatgatattaggttactcatgtgttaactttgtgtttatcaaaatggagattatccttattgtgctaaacttaatcagaggtgcttttaagagaaagagacacatcacagaaaaacacccctgctggcctgaaagtcagtgacttcttcgtggaacatgtaagctgcttatggtggccatatggcgggaaacatgtttgtttattgtcatcattcctgcctcctgtatgttgattccagtaaggagaataagaggatcgtatggcagaggggaaaaaaaggactctcattcatgcaagaaataaacacctctcacctgggatagcttaagagaaacaggagaccacaacaggtccacattaatgggaggaaaagggtaacctgggtaaaagtgctcactggcattatggaacagtatttagtaagctgtagtgaatgatcagcctctgggataccaatagtctaccaacaaggctgaactcattctatttcaatcagcatgtctgcaccattctggcgacccaggtttacactattcattgaagaaataccatgaagaccagtgggtaatgtcctagaattgaacttacttcaaaaagcatacctaattgtttgtttttacatttgaaaaacttttaaaacaatgaacttataattaacttctaattacagaagattctactgtactgttacatgattaaattgtaaacaccttaatatgaagattttttgaatgcatgattagttatgtagatagtttcttttagagtcacatgaccaaagtaacaattagagaaaacatttgaaatgagacaaaattaaccaaaaccacatcttttcaaaggcttggcataattgccatatttatggaaatggccagatgactaacaagaaacaaaaagattttggctttgctcaatgattgtttttgaccttttgaaatctaaaatcctggctaaagtattcaaagggaatattttgtaggtggcttcccagggtttccaagtaaatgaaggagggattctctctctgtcacccaggctgcaatgcaatggtgcattctcatctcactgcaacctccacctccctgattcaagcaaatcttccacctcagcctcccaagtagctgggataacaggcacctgcccttatgcccagataatttttgtatttttggtagagatgaggtttcaccatgttaaccaggcttgtcttgaactcctgacctcaggtcattcacccaccttggtctcccagagtgctgggattacaggcatgagccaccatgcccagccggaagaattttgataggcagaaaaatgcagattatatacactcattgctctactctgatttgcttcaacgctgaaaaattgaagattgtaaatgtagtctcaatttagagaaaattatcaaaatatttatttttcaaaaaagcaaatgtataaaattaatgggtatcaggtgtcattagctgctaaaaaaatagtatgactaaatttagtaagtatctagctatgcaaataacagcctaattaaattaacaccctaataggtgcatgtggaaagcattgctgtgcactgtggtgcacccagactcagcattttcttctgcctcttcacagagataccaattccccctgagttactcagtgtccatactgttgttagaaatgcttgttctctggtgccataaagaaatagtacttgaaaataaatttaattttcttagcaaggccattctttttgcaaaaagggcacactcaccagcagttttgctaccagagtacactgaacaaaagagacagggtcatttataacctgatgtgtccaccctacttttatgtttggtttttattggctgaaaagagacttcacattctgtatttttcccgattgtttagcaacttagaactttttttttttttttttttttttttaagacggagtctcgctctgtcgcccaggctggagtgcagtggcgggatctcggctcactgcaagctccgcctcccgggttcacgccattctcctgcctcagcctcccaagtagctgggactacaggcgcccgcaactacgcccggctaattttttgtatttttagtagagacggggtttcaccgttttagccgggatggtctcgatctcctgacctcgtgatccgcccgcctcggcctcccaaagtgctgggattacaggcgtgagccaccgtgcccggccaacttagaactttttaaaggaggcaaatgcagaggagaacaaagaaaggaggaagtaacttgtggaatgctgagacaggtaaaaacaccttcaaataaggaagagtaacaggctgtgacctaatgcttgcttggaccagtataagcatgccaaggcaaatatttaggctaaattatggaagctaagaacataaagtccattgatttttttgttatggctagcagatatttaagaatgttagcacaggtctttgaataaactttgcttctaagagaagttactatttattcctaattagacggggaggaaagtctttgaagaggaacctctacttcactttttatactgggaactgagaatgctgtgttcagagtgattaccgaaaacatggttaatacacttcttccatatgataataaaatgttataaatcttactctgcctcagaaaagcttttactaaaacattatctatagtactcaattagagttcatggaaaatttcaatattccaaataattcagacagttaaatgtcaatgaaatcccataaaacatttgaataagataagtcttcttagcaaataattttatattactggtaaatttagaaaaaaaaaatagaaaaccaggccaaatgtggtggctcacacctgtaatctcagcactttgggaggctgaggtgggtggaaatcccatctctactaaaaatataaaaatttgttgggcgtggtggcacatgcctgtaatcgcgggtattgagaaggctgaggcaggagaatcgcctaaacctgggaggtggaggttacagtgcgtggagatggtgccactgcactccagcctggatgacaagagcaaaactccatctcaaaaaaaaaaaaaaaaggatttttttttgtttttttttttctgtgttgacttactttacttagcataatatctttcaggttcatgaatgttgcaaataacaagattgtcttactttaggggctgaatagcatttcattgtttacatacaccatattttctctcttcattcacttcttgatggacacttagattaataccttagctattgcgagtaatccacttctttccttctcttttgtttttgtttcgttttgtgtgagacggcgtctctttctgtcgcccaagctggagtgtagtggcatgatgtctgctcactgtaaactctgcctcccaggttcaagtgattctcatgcctaagcttcctgagtagctgagattacaggtgtgtgccaccacaccaggctaatttttgtatttttaatagaggcaggctttctttatgttgaccaggctgcctttcatttgtttgtatatttctttctccctttccttctttatttctagaagtattttacttttaaaatataaattatgactgttataaaccttcatttctctgtctttgcttactattatggctgattaaaaataagttttttgaaatttcctggataaagttattatttcattattaacataacgagaaaatatagaaaggaaaaccaacatttgttagtaaaacagaaattatctagctactggtagtgatttagtctctcacccaacatgaatgctacatcttggtgtcatctctcccagtcgtatgaaagaggctactgatcaaattggtcagcataaaattttgtgaagtttaacacctttgttctaaaaattaagctgatctattaccaaaaaagtagattttttgatatgtataatttgactctatttaaattccgcagaaaaattaaactgacaacatatatttaaaagttttttgagggctgggtgcggtggctcatgcctgtaatcccagcactttgggaggccaaggcgggtggatctcgaggtcaggagattgagaccatcctggctaacacggtgaaaccccgtctctactgaaaatacaaaaaattagacgggagtggtggtgggcgcctgtagtgccaggtactcgggaggctgaggcaggagaatggcgtgaacctgggaggcggagcttgcagtgagcttgtgccactgcactccagcctgggtgacagagcgagactccatctcaaaaaaaaaaattttttttggaaattaaaaatgcttaagaaacatatttatagaaactaaaagtaaaaataattttagattcttagagaacatctctaaaatacttcaagttatcctctgagagtatatatatatatatatgtatatatatgtgtgtatatatataaacacacacatatatatacatatatatatatatatacatatgcatgcatatttttttttgtttttttctttttttgagacagagtttcactcttacccaggctgaagtgcaatggcagaatctctgctcactgcaacctccacctcccgggttcaagtgattcttttgcctcagcctcctcaatacctgggattacaggcactcaccatgcctggttaatttttgtattttcagtagagatggggtttcactatgttggccacagtggtctcgaactcctgaaatcaagtgatctgcttgcctcagcctccccaaagtgctgggattacaggcgtgagccactgcccagccaagtgttcaacttttctgcatcaattatctcagctcagaaaatttaaatcagccaattagcttacctcaggggattccaagcagctcattagcactccccaggagaatccaatcaacaaattagcttagcccagctgattagcccaggtgatttcttttctttacttttctttttcttttttttttacaggaacacagatttgatgttttaataaaaaaaaaaatacgatttctgcaaaaggtgcttaacacggcccaggacgggctgtccggtggagtcagccctaggacccctgaaggatgcataaagacagagccggctcgccagcacgctcctgccagcaccgggacccactgcgagccactgcggggtgtccttcattaaaaaaaagtctggattgtgacattgcaaaaggagtctgaaagccatatgcccaattcctgaatccctacgttagaactgagagtttaggctgggcacggtggctcacgcctgtaatgccagtattttgggaagctgaggcgggtggctcacctgaggtcaggagttcaagaccagcctgaccaacatgatgaaaccccgtctctaataaaaacttgcccgtaatcccagcactttgggaggcctaggtgagcggatcacgcggtcaggagatcgagaccatcctggctaacacggtgaaacaccgtctctaataaaaatacaaaaaaaattagctatgtgtggtcatgggcgcctgtagtcccggctacttgggaggctgaggcaggagaatggtgtgaacccaggaggcggagcttgcagtaagccgagattgcgccattgcactctagcctgggcgacagagtgagactctgtctcaaaaaaaaaaaaaaaaaaaaaaaaaaaaaaaaaaaaattagctgggcatggtggcgcatgcctgtaatcccaattacttaggaggctgaggcagaagaatcgcttgaacccgggaggtggaggttgcagtgagccgagatcgcaccactgcactccagcctgggtgacagagcaagattccataccaaaaaaaaaaaagtgagtgcttagctggagtgaggaggaaatactgaattcctaggtcaggaattcatttcattttcaccaagcgcagatatcccagctcctgaacaaggccaagaccgagggtctggcaccgggcacgtgtaagaaaggactgttttaagaaccttattacacaaagctcttatttctggatccaccactgcttacatttgcacccagacaccacttctaggtgcaagaagaaagatcaggacatagagaaaaatgcacacagaacgatgagggaggatgacgagggagaaagcctgcatcagagcactagcccagatgatttctaacagccaactagctttttctaggggacaccaatcagccagttagctcagctgatgtgaatcttataacccgattagtttagcacaggtgattttaaaccaccgattaactcagctcaggtgatttcaatcagcgaattagctcagcccaggtgatttcaatcagctactttatcaacccaggtgaattcaattagccaattagctcagtctaggtgatcccaatcacctaattatctagtggctacagattcattaaggtatgcccaaaattgtaaatgtaaatagcccatgaacaccaagaagaaatgcagggccctatatgctaacctggacagtatgtataacacagctttactgtcactttatttacaaggcctgaaacctgaagctgaagctttacgtttatataaacaacactgtatggctatgtttcattctgacatgctattgagcaaaagagaaggcaattaattctgcatctgcatccttagtatatgctctatattttaaaaagtgggaaaatattgtatgtatacattaatatttacatagatacattcatataagtttgtgagtgtttatgtagctaccatatgtgtacatatattcatacacatacctaagtgtatataaatatatatatgaagctgtaacaatttttgtatttatattcatacaaaataaagatgttgaatgtggaagtattgatagctattgctacaaacagtaatacagaaccttccatacctgtataaaaatattttctctatagactactatatctagaatagtacagaaatagaggaatgctctaatatacatcctgctgcagttaatatattcaaagggagcattgggctttgttttgcacttctggaagatgaaaatttactaagaccattggagttatttactgccatgtcagggttgacttttcttttattgttgtacatagggtcagagatgaaccagccccagtccaaaggtctaacctaaatatgagaatacttattctttctctttagaacttccatcgaacaagaactgtatttatttccaaaagtgtgtgatgtaaaatcacactattgtctttcggtctttgtggcagaagttgggtatttatggtaatgaaaaagaagtctatgtctctttttagaagacagatggtgatggaagcaaatataatggtacatggtacttggccacatttcaaatgggtgatattgaatagtcgctgaagtgccacaggtggcttttatttcccaggtcaaatcttctttgtgaggaaggctcagcccactgttgtcaagcatttctggtaatttctagatagatgaacaaaatttcactgggctggattaatgagaccaggtttaaaaacacccaggttccaggttattaaagacattgttaaatttgtattaaaaaaagtggcatggtgtgcggcttggtttgaataaatcttcactgagctcagtagctgattacctaacctgtaggtaaaggaattggaaaaacctctgaccaagtttattttataggcttctttctgtacatgtagatataaaataggtggctagataaacatatacacatgaaatgagtcacacgtgtatgtctacgtaatgtttatttctgcatatgactctcaaaaaaaaagcctcaggaataaagtcagatgacatctcggtaagctaccctgaagctgaggtaaatcaaataagcaaattagcagaagtcgggtgattgcaatcagtcaatttgcacagctcagatgattccaaccagcgaagtagctcagcccaggtggatacaatcatccaattatctaaatgatgactggctttgtcaaggcaggacccaaatggtggatgtgtacagaacatgcacacattgaggagaaatgcagggcgctgaaatactaacatggacagatgtgttgtacatggctttattttcagcttctgtggtcttgcccttgaagataaagctttgttgatatttacataaaaaacattgtatgaatatgttccattctgacatgttatttagcaaaagaaaaaagaagtaattctacatcagcatctttagtacatgctaaaagattaaaaatgttttttgggaaatttgttttgtataaatatttatatagaaatatttatttaattctctatgtgagtgtttgtcttcctatgtacatttatatctagatgtgtcaatctttgtatcgatatgcattgctatgaatagtaagataaaaagtaacttctggctgggcactggggctcacacctgtaagcccagcactttgagaggctgagatgagtagatcgcctgaggtcaggagttcaagaccagcctggccaacatggtgaaaagccatctcttctaaaaaataaaaaaattagccaggcttggtggcaggtatctatatttccagctacttgggagtctgaggcaggagaattgcttgaacccaggaggcagaggttacagtgagccaagattgaacaactacactccaacataagcaatagagcaagattcaatctcaaaaagcaaacaaaaaaaaaccccaaaatgatgatatgtaaaacctttaaagttcttttatagaatataaaaaatatgtaaattcacatacatctgagagatacaccacataaaataattttaatatcaataacaaactggaaaatatagaggcatggtttatgtattcaactgaagttgttatgaaatttaaaaatattgttttaactttaagatgtatgtcatttccagctgtcaaaatgattacaaagataatatttatagaaagtatgcaaaagaaaacaaaaaataatcaaatcatgccagtacaaaattaaatgaaagttaagaaagtaaataaggaaaagagaaaaatataactactagaaacacacaaaacaatatcagtataactagtaataacaacatcatttccctaagcaatcattttaaatataaattaattaaactacttaataaaatgaaatgtaatcttaggattttggaaggccaaggtaggctgatcacttgatcccaggagttcaagaccagaattctcaataaagaatacaaaaaaggtagctgggtgtgatggcacatacttgtaacccagctacttgagaggctgaatgagaggatcatctatctgagtttgggaggttcaggcagcagtgaactgagcaaatcagcctggctgacagagtgagaccctatctccatgataaatgaggccaggtgcagtggtgcacacctgtaatcccagcactttgggaggccgagacaggcaaccacctgaggtcaggagttcaagagcagcctggccatcatggtgaaaccccatctctactaaaaatagaaaaaattagctggacatcgtggtgggaacctgtaatcctagctactcaggaggctgcagcaggacaattgcttgaaaccaagaggcagaggttgcagtgagctgagatagcaccattacattccagcctgggaaacaagagtgaaactcagtctgaaaatgtatatatatatatatgaataagtaaaattatataaagaaaaagaaatagaatgcctgagtagttttttataaagcatacagtatgctgcctacaaaagattcattttagcaatgagtcaaataggctgataaagtaacagaatgaaaaagatgtatatcccatgagaatagcaaccacaactgagtgaggtggtcataattataatagacataatatgctttaagtcaatactgtcatgaaacaatgattgatattgtattatgataaagtgagttaatatagcagaaatctgtaactataatatttatctatatatatatgtgtatacaacatcagggctttaaaacgtacaaagcaaatattaacaaaagtgaagcaagacacacatagcaacataattcctgtaggtgaatgtttagtaggaaaaactaaaaactgtaatggctgcatagggtcaattcatttcacttgtgcttgttgaattttttcttcaattaattgaagttcctctaatgcctctttagaaagggagcatttactgttaaggtcagaattagcttgtaaagtagaaaaaaggtgagacatagcataggtaggaatgcctaaagatggacaaatccaattaatgtctcctaataaatttgaaaatcatttagagtttttaaattatctctttcaatttgaactttttgaggattattagtactttgttctactttcattcctaaatattgaaagggagtagaggtttggattttgtcaggggctatgattaatcctgctgcagtcacagacttttctaactgttgttagcatagcattacttcctctctagtttcagctgcacataaaatgtcatccatgtaatggataatataactttttaaaattgttctctaactggcttaatagtttttccgacataagtttgacaaatagttgggctatttaacattccttgtggtaatactttccaatggtatctgtccgctggttctttgttatttatagtgggaacagtaaaagcaaatttttcataatcttgggtcactaaaggaatggtaaagaaagaatctgttaaatctatcactattagaggccagtatttaggaataatagttggagagggcagccctggttgcagtgcgctcatgggttgaaatatagcattaacagccctcaagtctgttaacattctccgtttacctgattttttcttagtaacaaacacaggagaattccaaagagagaaggtaggctctatgtgtccctttcgcaattgttcctgtgccaattctataaaagcctccagtttttcctgtttcagtggcattgatccacccaaacaagtttggcagttaaccaaacaaggggaatgggagctggaggctcagcaatggccactcctaaaaatgataccctaatccagttctatctatttgcccttttagttctaaaggttctggttggctattttcattttttcctaatcccttccccaggagatgtccaatttttctcataatttgtttactgttattactatactgttccataggaatagatatttcagcaccccattgttgtaataagtctctaccccatacatagattgagaggaatatgtgtaataataggttgaattgtcccttcttggccatctggcccttggcatggcaaaattaaagaactctgaaaaacttctgaggcagtccctatgccaacaatacccatggaagccttttctttgggcattgtcagggccattgatttaaagcagtaatagagacatcagctccagtatctactaatcctttaaagtctttaccttgaatggttactgtacaaataggtcttttgtcagaaacttgattaacctaatggacagcctttcctgctggattcgtactaccaaagcctcctgttcttttcactgtactacttcctagctttgtgtaaggtagtagtaataattgagcaattctttctcctggagaagcagaccatggagttgaggaagtaataactatttgaatttctctgctataatcagaatcaattattcccgtgtgaacagtgacaccccttaaatttaaactagaccttccaagcaatagaccaactcttcctgagggtaaagggcccctaactcccatggggaccttctttggtggctccccaggaagtaagaaaatgggaactgtactgcaaaaatctatggcagcagtgcctgctgtggtgggggacaattgttgtacatttgtaagggcagtggctgtgccagatatgcctcggtttgttgaggggcccaagttgggcaccccttcctgtttcccgaaagaggttgtccacattttttttattttttatttttttaaatgttattatttttatactttaagttttagggtacatgtgcacaacgtgcaggtttgttacatatgtatacatgtgctatgttggtgtgctgcacccattaactcatcatttagcattaggtatatctcctaatgctatccctccctcctccccccaccctgcccatctttactaaatttagaatgacactgatttgaccagtgaatcccttttttatatcgggggcagatactgggacttttttgttgcttaccggtagtagtctttgcctgctgatttccttttttacattccttttttgtgtatccaaattgcccacaattaaaagagactgagaaatggggcatgttttttcccctttagtccagccatagcttgagctaaatgaggagccttatgtaaattacccctaatgccatcacaagccttaatatattcagccaaatgagccttccctctcataggtctcatagcagcttgacattctgcattggcattatcatatgcaagaagctgtattgtaacatcttgagctgttttgtcagttatagctttatgcacagcctcttggagctgaggaataaaatcagcatatgattctttaggtccttgtaggacagaactgaaagaaggatatttttctcttgtaacatttattctctcccacgcccataagcacacagcatgcagctgagaaatggcaacattctctatcactgcctgattttctaatcacccccaattagggccaactcccattaactgttcaaaacaaacaggcacaggtggctgtgcttgtatgttttctcttgcctgagtttgagcttcatcagcccaccaagttttaaactgcaagtactgagatggagtgagaacagattttgttaaagtatcccagtcatatggtataaagtatcccagtcatacggtattaacctattgtcaagagccatattttttaataaagtttttacaaaaggagaatttggcccatattgactaatggcttgtttgaattcctttaacaacttaaaagaaaaagtggcccaattagctatatttcatccttcttgttgggttatagtaactggaaattgccatgcttcaaagtcaccttcagctctagctttttgaatcgaatttcgtataggaccaccaatcgctccaggttttaatgttgcaactacaggagtggtaagtttctcagctgtttcattttcttgcccattatggggagagggaggatatggccattcacttaattcagcaggtggaatcaatgggctagtaaaacatacctttttcagtttccctttgttttctttaatttcctccagttgctgttcctcacattcagaatctgaagttagttttttacactagtctgcctcttcctcttctgaatctgccttgtcatctgtttgaagtgccccaagagctgcctttatcaatgcctgcactgaccaaacagaaactggaattttggctccgtctttatatgcctttttaaattctctgccaattcttttccattcatccaactccatagtctcatgttctgggaaccatgggcaaaactgctctacagtactaaagagtgtcaataaattctgtgtactaactttcacatctcctctccataataaatgccttagaagtttaaacaagcagaatgtttgctttcattctgtcccattgttaccctggttcttctgagtgcccagcttagcactgagcttcttttagtcatcctcgggtgtcctctgacaatatgtcctctgcttccacaagctctagcgttccttcactggggtcttcatagtcccacattgggcaccagaaatgttggggtgatcaggcccaacaccaggccatgtgggctatgaagtctggcggagtcaaaggattgagacaagacaagttaagagtacttaaattgggtccagggggccaatgctagtatggaggctgtgaaggccccgagctctggaagcccacactatttatcagtgatcagacaaataagcaggtggtaaggacgtgcggatgtggggtaaacaggtgaggacgtgaggacttcgggctagaaaggtagcagtgcatcaagtgtagctgtgatggtttcacattttctttgatgcatacgtaatatgctgtgctacctgacataatggagaacatgtttatgagcctgggagagcaagaaacaaggaatcaacaagtctgtgccattccagaggccaggaggggttttatgccctgagccttggattccatccgagccacgaggggttttatgccctgggcttagattatggtgtggcaaggcagccttccaccctttggcacagagctttgtgttccagaggccacgagggggtttagaccctggacacaggacttgttccaagacccttttacattaggacaaacaagctagtcctgcctcagctcttctaccaacagtgatccacccacctcagctgctcaaagtgctgggatcacaggcatgaaccaccatgcccagtccatttttagtcctttaaagtaaacacagatttgtttagataaaagctcattttaagagcacacaaaagcttagcacaaagataggattaaatttagctatacagaatgataaagactaaaagatactaagattctttgaaagaaacctgattatccaaggtaattatccaatatttgcagactgaagtacttatattgcaaaagcaagaacagttcagtgcataaactgaacagtggagtctgtagttgtaccttgctttctatttattacttcagagcaattagcatagttatgtgtagtgtttgtagacaacctgcattcatatacactaaatagtattttttttttttttgagactgtgtctcactctgctgcccaggctggagtgcactggtatgatcttggctgactgcaaccactgggtcccgggttcaagcaattctcctgcctcagcctcctgaattgctgggattacaggcacccaccaccatgcctggctaaatttttctatttttagttgagatggggtatcaccatattggccagcttgattgtgaactcttgacctcaggtgatccacacacctcagtgactcaaagtgctgggattacaggcatgagccataaagtttctttttttttgagatgaagtcttgcttttgtcccccaggctggagtgcaatggcatgatctcagctcactgcaacctctgcccctcaggttcaagcgattctcctgcctcagcctcccaagtagctgcgattacaggtgactgccaccacacctggctaataataaacagtattttcttttatttattattattattttattttttgagacagagtttcactcttgttgctgaggctggagtgcaatggcatgatcttggctcaccctcagccacacaggttcaagcaattctcctgcctcagcctccctagtagctgggactataggcatgagccaccacacccagctgattttgtatttttagtagagacggggtttctccatgttgatcaagctggtcttgaactcccgacctctggtgatgtgcccgcctcagccacccaaagtgctgggattacagacgtgagctgccacgcccagccaaataaacagtattttctacaatagtatgaataaaaatccacaatacttactttgaatgaatcacttgaatgtttattttaatattgttatttacacttttgaaatataaattgttttaactgaagtatagttgcaatttttaagaatgctacatacattactactagtttactaaaattattcatactcagatatttatatctaatatccaaaaaaaattgctaccaaattgctacagtagatattagtctgacatgtttattactttattcaatagggataattataagtaaacataatttaacatcttttatttcactaaattggaatgctgctattacaaaagaaataaagacaggtaatctggccacccaaaaaccataatagttctcctgttaactatgttgtaagttctaatgtattccaccataagaacatggtcagattctatttcttcatcagaaagtgttgttggaagttttcaggtatatttcaatgtagaacccccattcagtggctagaaaatgagacagcagcagagatggaaaaaaaaaaactataaaattcttgtgaaaatctgccccctttcttcgtaatgctcatgtttctcatgctgagagtagctgtgcactttgggtggttagagagaaattgcttttaggggactattttctggctgacttgatcaatcttatatctaatctgagctttttcataagatctttttaacttctctcaaaataatcttgctcagatagagatctggttttctctccagtgctttgggtgtctgtttcagaagtgctgttagtttcccatggtgtctgaatgagctgggctgtcacagtgagaatttctggagctatctctatctggactcatgctggaaattcagcagtattttttttatgtcaccattataaataaaaattggggctgaaactccactcacattcccattgttgtgaaggtgcaattctacccacgaggcctgcaggctctcctcctgcagctcaggctttactatctaatgtgactctagagtgctgctgtagcaaatggggttcacataaactgtgagctgtgctctcggctgtgcctcagtggcagatggtagaggccaagagaggacactagcaaccaggagaaagcaagcaggagtgctataacccagtgtcagggagtgcagagccactgctccaaaatgtaaatagccaaaatgatagaaccctattcaaccacttttgtagctagtgaaaacctaccttcagcaggcacctggcttcaagctgctaaactaccttctgttatgaagatggaaaaagtttgtccttgaatataagcaattagcatacacagatggcctcttcaacctgcctgtgaatttaggatgaactgtgtatgacgtggtgctgtaaattttacttgtggactaattatggtgatcatctttctttgcagtctcttaagcagattgactatgatgcatgtcacattcaagtttaatggtgtaataaaactgttttctttctgttttactattgtggagtttttttggggctggagaaaattgttcttttaattattgtttccaaacactgcctagaattaccaggcatgatataaacacataaggtgccaaccagaatttactttagaggaaactttccctctcagacttccagtcaactcacacttgtgcaacaaagtgcatgctgtcccctaaatatgcaggcagaactgtgtctctgcccatttggtatctatagtcctctatagttacttctagagagactagaccacatttctactaacttcacagggcaacaattaatcattttatctcaatgactcttgtatcttcagacctgaaactgattcagagaccatggggcccacaatcctaatctgagtaacatgtgtgcattgagtacatatgcagacatgagaatctccactttcctcttttttctcttggtaaattgctcacaaatgtataggtaacacctgctcctactccagccattcaggctctaaatctgcagctccacattttgtatccaggtcttgagatttgggggatagaacatttttgtctaaaaattgcaagtccttttggttatcaaactcagacgttgaaatgaaagtgcagttgtctttcttcccctttaaaatatgtattcatctcttgaaactgtttgctattgccacaagtagatatatattaaactaataatgccacattggatgctatatctcataccctaaaccataataatatatatctaatcaataatcaatgctatttctgtaaataaataaatatttctgacaaacaactttgccattaaaaaaatacatgaaagcagtcatggttcctacaattcagaaacatttagtctagactagcaactgcataaataattgaattatgcatcatatggttggtacaatatatagacgcatccaaaatcttgggctttatttaggccactttctttatgctgttgtgacttctgatgtctaccactgaagagatatttattaacagaagaattgttattataatttctttctttctttctttttttttttttttagacagagtctctgttgcccaggctggagtacagaggcactatctcagctcactgcaatttgtgccactagagttcaagtgattctcctgcctcagtctcccaagtagctgggattactaggccctgccactgtgcccagctaatttttgtatttttaatagaggctgggtttcaccatttttgtcaggctgttcttgaactcctgaccttgtgatccacctgcctcagccttttaaaatgctggaattatgggcctgagcgactgcacactgctgtatagtttctattttttttttaacattgctaactgtacatatttattttccaataaaattaccctaggaaaccttaagggatttgtttaaattgcatattaatgcatagtatacatttaacaggacagtggctagaaaagataaaaattacagaaactctgggatttaagtttcttttaggtaagcttagaaaaagcaaaactggaagtaccccagtggcatagagaacagaattctacatagggtcctcaccctgccccagacctgttcagattcaccctttttggaggccttattttggtctggccctaccatggagtcttgccttgcagaattgattagaaaagatcagagttttagctggtgaatcctgctgcctttctagacctgctgctcacaatttcctgaaatcctaaagcagataaatgggaaaaataaagtatgtatttgagggtcttagtttttaaattttcaatgaaaaccagtggttgcagagacattctatttagcaactttttttttattcctgcagatccagtagtttctgcacaagtcacaaaaaagtaaatacaaacagaataaaattttctctaaataactgaagaaatgaaaatgctgggccctttttctaaatagtggaaattattaaatccttagtaccagctcctaggatgttatgagaattaaatcacataatgtgttatgcccaacacagtgctctgtatcatacccttgagcatatagtacctgcttaataacattgcattagtacatgtgtacatgttgttttttaaatccagacctattcagacattgctgccttctgtttcttctgtaaactttacagagtcggcaaagaatatataactttaggatacagatggattgtccttgtttgtatcagaagtatttggttgtgacaagagtgctgagtgtaagggaccctgtgctgtgtctgcttctgtaactaatggtaataatgagccaatggggagcaacatcagcattgacaggggacttgtttaaaacccccattcatggacccttttcaaatctgcaatcacattacataaagtgggtaaaattaccaagtgatttataagctcgttaaagcttgagaggcaatgcttagcttagtgattatcagctcaggcttcttattagggtcacatggccaatttgcagaatctattgtgccctccccgcagcttctgtttattgttgtgtgtggaagcatccacgttgttttaatgaagtgcctcatgtgactctaaggtaaggacagaatcaggtttgaaggcttcaaaatacattcatgagagttaagttccacctttgcactaaagcatggtcactgggcctactctattttgacttggtagggacaggtcagtgtggtggatatttgtattactgtagcagaaattgctggtgtctgtggcaggggagggcacctgagtacaggaaagaagaaacttatatctttatcttcatggaggagtgtattgttcccaaatctcttctgctttaatggacagaaatgggtgggctttttctgtcttttctgtcagttgatgtcatgctagcaggtaaacatgtagtagtgccacctttaagggcatgttctccagatgcaggtgtaatttgtccagagaatctcagaagaaatccggaggagaaaaaaaaaaaaggtttttcttcagttaaacatgtcccaaatgaaaagctgtgtccactctgcctccttgaatgccatgcgtttagtacttgcaaatctttacttctctacttgtgttttttcttcctaaggggtttgatttaactacttctctaaattcttacaatagtcaaggatctctgaaaaatatttcttttctttatcccagagccttctctttattctctacatcatagcttcttatatgccacacagaattctcagcaagaatttatgatccacaatattaaaaatgtttcctttgtggctgttgaacatggaaagatgtggatactcaagatttctattgaggaaaactgtggtccttagtacagatagagaacatgtaatgttgaggcttcaatcatgtgttccatttgctctaagcagaacaggattaagagaatgcgtatttaaatgggatggcatttattacccagaaagttctgaaaaaaattattaggagattcctgctctctagggtgcttaatgaagcctacttaaaattcctactaaaaattacagaacataggagttacctgtgttttgaagtttgcataaaactgattttctttatggttaaattcagattttaatttactttgtttgggaggaatatttcaacactgatgctgtgttcttgtgtattagtatatcataaaaatttttttcatgtggttaatgggtaatgattcatttggtgaaatagctctctgacagatgttttcactatataattattttttcttcattattaagtatctttctgcagctgatatgcataaaccatcacatttaatctggaagctgttcttttttcttatttatttatttattttattttttattttttttttgaggagtctcactctgttgcccaggctggagtgcagtggtgtggtctcggctcactgcaacctccgcctccggggttcacaccattctcctgcctcagcctcccttagtagctggaactacaggcgcccaccaccacgcctggctaattttttgtatttttagtagaaacggggtttcaccatgttagccaggatggtctcgatctcatgacctcatgatccatccgcctcagcctcccaaagtgctgggattacaggcatgagccacctcacccggcccttttcttatattttactacatttttttctggaaaattaaggctcttatctttgtttacaggccagaaaaagtgggaaaaacaaaggctcttccatttattgaatgacaaaatatccttcttaggccaaaaacattggcattactagtgagcttgttagaaattcaaaaaatcagtcaggtacagtggctcatgcctataatctcatctctttcggaggccaaggtgggctgatcacctgaggtcttgagttccagaccagcctgaccaacatggagaaaaacctcatctctacaaaaaaaaaaattagtcaggtgtggtggtgtatgcctgtaatcccagctatttgggagactgacccaagagaatcgcttgaacctgggatacggaggttgctgtgagctgagattgggccactgcactccagcttgggcaacaagagcgaaaatctgtttcaataaataaataaataaaaattgagagatgtcttccaactcaacatgtcttttccatttggaaaatattcacaactacttccgtatgatgtaaatatagcacacaaaagtgtacatgttcatgtttatgcttttaattttatactttattatctagaaaagtatatgaacggatgttgtggatcttacgctactcttttttcttagagttagagaatacattagagaatatttctgtgttgaaaattattttattggataattttagtcagtcctataagtcagaaccagttctgtttactctctaatttcaccttaagtcaaattaaaaatgtcgctcatggttacttagtaaatatgtgtgtgtgtgtgtgtgtgtgtgtgtgtgtgtgtgtgtgtgtttcaggtaccatagcaatttagagacgtggccatagaattctctctggaggagtggcattgcctggacactgcatggcagaatttatatacacacgtgatgttagagaactacagaaacctggtcttctttggtgaggataactttaatacataattcataatatacgctaaagattttatttcttttttttttttttttttttttttgagacggagtctcgctctgtcgcccaggccggactgcggactgcagtggcgcaatctcggctcactgcaagctccgcttcccgggttcacaccattctcctgcctcagcctcccgagtagctgggactacaggcgcccgccaccgcgcccggctaattttttgtatttttttttagtagagacggggtttcaccttgttagccaggatggtctcgatctcctgacctcatgatccacccgcctcggcctcccaaagtgctgggattacaggcgtgagccaccgtgcccggccttatttctttattttatggaatgttttttagtaatttattcttggcataaaagagtttcagatcccctttttccagaaaactttcaaaatttgttcatttagaaaagaatttcttcaaaatgtttcatcttaatccaaactttccacattcctgagttgagctgtatttttcactctaaattagtggtaattccagcaatttagtagcataaaatatgttgcccctacctgaaaatctaatgtttgattcagtagtaccaggtagtcaggtagtaaaattaaaaaacctacaaattgaaagtattttctaaatatttagaaatttcctttagaaattaatattttggtattaatttactagaatattttattatatcctctctgctgagcacattactaacctgtacttggagaatatgagcatgattcatgttattttttttttttttaataaaacaggtactgttgccgggcgcagtggctcacgcctgtaatcccagcactttgggaggccaaggccggcggatcacgagggcaggagatcgagaccatcctggctaatacagtgaaaccccatctccatcctgaccgagaccatgctggctaacacggtgaaaccccgtctttactaaaaatacaaaaaaaattagccgagcggggtggcgggcgcctgtagtcccagctactcgggaggctgaggcaggagaatggagtgaacccgggaggcggagctggcagtgagctgagatcacaccactgcactccagcctgggccaaagagcgagactccgtctacaaaacaaaacaaaacaaaacaaaacaaaacaaaacaaaacaaaacaaaaaaacaggtatcgttgtctggaagtcagacctgatcacctgtctggagcaagaaaaagaaaaaaacctttgactatgaagagacatgagatgactgccaaacccccagctaggtgcgagtgaaaatcaatacaatagacaacacagataagaggtcccaaggtcaaagagaaagccggtccttaaaatgtgatttgggaagctgtgttccaaagaaaatagttcctgggcagctcgtgttttttttttgttattgttgttgtttattttttaattttgctttcacagagaggcatcttctgttttatgattttaaattctctaagaattctgcttttcttttggtgagcttccttcaagtccacagtgagagccaaagtcctcatcatggcatataagagactgcacaatctggctgctttttcattgttttgggggcacataaatatctgcatgctttttagagactaaaactattttttaagttttttttttcatcaagtctgaaatgtgtgagagtagtagtttctgttgcatttttttgttcatttttccttacagtccattctgttttcattactatatcatcttgaaatatagtttgaaattagtatgatatccttctgctttgttcttttttttcaagatggctttggctattcaaagtttattttaattttatgtaaattttggaattgtattttccattactgtaaaaaaataccattgcaattttgataggaagtttattgaatctatagatcacattagataatatggtgcttcagtaatatttattctttcaatccatagacataaaatagtttaaaatttatttggatcttctccaatttttttcatttttttattgtgaagattttttacccagttggttaattttttctcagaaatttattatttaatgccttagtaattgagtttttgtcttcctctactttattatttttttgagatggagtcttgtactgttggttgcccaggctggagtgcaatggctcagtctcggctccctgaaatgtccgccacccagattcaagctattctcctgcctcagcatcccaactagctgggattacaggcagccaccaccacacccagctaatttttgaatttttagtggaaacgggattgtatcatgttggcacactggtctcgaactcctgacctcaaatgatttaaccgcctctgcctcccaaaatgctgggattagaggtgtcagccactgtgcccagcctcattctctattttatcagatagtttgttttaagtgtatgaaaccatacgtattcttaaatgctaattttatattttgctaatttactgagtgtatttaatagtttagacaggttttaatgtactgtttatggtttttaaacataagattgtatgatctacaaacagcagcattttgtttttcttcaggttcaaaagatttttttattttcttgtctaattctttggccaatacttccagtgctacattaaaatagaagcattgacaatgggcaaaatatagttttgtattggtgtctgaatttgatggagcaaacacatcttcatgttttttgtttttgttttgttttttgtttttttttgagatggagttttgctctcattgcccaggctgaagtgcaatggcatgatctcggctcaccgcaaactccgcctcccaggttcaagcaattctcttgcctcagcctcccgagtagctgggattacaggcatgcaccaccacacctggctaattttgtactttttagtagagacagggtttctccacgttgaggctggtctcaaactcctgatctcaggtgatctgcctgccttggcctcccaaagtgctgggattacaggtgtgagccaccatgcctggccatcttcatgtttttataaactgattttagaaggtaaagatcttttgttgggtccttaggatgataagatgccctctgaatttgtagtgaagaggggctgtagcttggtcacaaggctgctgggtctgcattagggcccacctttagttggcttgttacaggggcttgggttgttgtaattcccattttatttttgaacaaactgcatatccttcaggactttgctctacagggcagacactagggcacatttttgcagttggtttttcacatggtgggccttgtatcaggatgtggatgagtgtggctttcactaagtaccagagagcatttcctcaggtaactgtgtgagtttctatataggcagcactggccatgaactgtggctcaggtaactgaaactgcgtcactgaaccacttcagggaccacagtaaaggccaacttctgcagttatatttttctcatttcctgttttactttcttaattttcatttaattttgtactggtatgctttgattattttttattttcttttgcataaattttataaatattatatttataatcatcttgaaaactggagattacatctgaaagttaaaacaatatgttttaatcttataacaacttcaattgaatacaaagattatgcctctatattttagtttgttattcatattgaaattattttatatggtgtatctattaacagatttatgcagatttacatattgctttttatattctattaaaaaactttaaaggctttatgtgccatcattttttaaaaattattattgagattgaatcttgctgtcttgcttaggacggagtgcagtggtggaaccttggctcactgcaacctctgcctcctgggttcaagcaattctcctgcctcaggcctcccaagtagctgggattgcagacgcctgcacctagccttggtaattttttgtatttcttagtagtgctgggctttcaccatgttggccaggctggtcttgcactcctgacatcaggtgattcacctgcctcagcttctcatagtgctgggcttacagttgtgagccaccgcccccagccagaagatactttttatctcactattcctagctttgtatatcaatacaaagattgacacagctagatataaatatacataggaagacaaatgttcatatagagaattatataactatttctatataatgtttttgtatacaaaatatgttccccaaaagacatctttaatcttttagcatacatctcagatgctgatgtagaattatttgttttcttttgctaaataacatgtcagaatggaacgtagccatacaactttttatgtaaataccaacaaagctttatcttcaagggcaagtctacagaaataagctgaaaataaagccatgtaacccatctgtccaggttagtatttcagtgccctgcatttctcctcagtgtctgcatgttctgttcacatctaccatttggggcctgccttgataaagccacagtgactatttatataattgaatgattggatccatgcgtgctgagcaaattggctggtgggagtcacctgggctgttcaaattggctgattggaatctcctgggttctgctaatttgcttatttaatttacctcggcttcaggggtagaatatggagatatcacctgacctactttatttctgatgcttttatttttgtggggcctatgcataaataaacattacgtagacatacacatgtaactcattttgtgcatatatgtttatctagccatctattttatatgtatatgtacagaaagaagactataagataaacttggtcagaggctatttccatttctttacctataggttaggtaaattctatcagctacttagctcagtgaagatttattcaaaccaagccacacatcacatcacatttttttttccataaatgtaaaaatgtttttaataacctggcacctgggtgtttttaattctggtcacactaaaccagcccagtgaggttttgttcatctgtctaggaactgccagaaatgctcaacaccagtgggctgagccttcctcacaaggaagatttgacctggcaaataagagccacctgtggcacttcagtgaatgttctctatcacccctttgaaatgtggccaagtaccacgtaccattatatttgcttccatcatcaccatctgtcttccgaaaagaggcctaaacttcattttcattaccataaatatccaacttctgccataaagacgaaaagactagagggtgactttacatcacacactcttggaaaaaattagagttcttgtcttgatggaagttctaaagagtgggtgagacattaagtgactaccaggagctagataattgctgttttactaacagatgttcattttcatttccatattgtctcaagttatggtaataataaagtaataatggtatccaggaaatttcaaaaaaacttatttttttcatcagccataatagtaatcaaagacagagaaataaaggtttttaagtcataatttatattttaaaattaacatgcttctagaaataaaaaaggaaaggaagaaagaaatatacaaacaaatgaaaggcagcctggtcaacatggtgaaagcctgcctctactaaaaatacaaaaattagccgtgtttggtggtgcacacctgtaatctcagctactcaggaggctgaggcactagaatcgcttttacctgggaggccgaggttgcagtgagcagagatcgtggcaatgcactccagattgggtgacaaaatgatactctgtctcaagcaaaataaaaacaaaaacaaaacaaaaagaagggaagtggaatactcacaatacctaaagtatggaatcaacttaggtgtacatcaataggtgaatggagaaagaaaatgtggaattatgtacacaatgcaatgctattcagcccttaagaaagtcttgttatttgcagcatcatttatgaacctgaatgatattatgctaagtaaaataagccagcacagaaaaacacacaagcaaaaaaattattttatttttgagatagagtttcactcttctcacccaggcaggcgatggtgcagtggcaccatctcagctcactgcaatctctgcctcctgggttcaagcaattttcctgcctcagcctccctagtacctgggattacaggtgccagccaccatgcccagctgatttttgtatttttagtagagacaaggtttgtctatgttggccatgttgaccaggcttgtcttgaactcctgacctcaagcggttcacccacctcagcctcccaaagtgctgggaggtgagaggtgattacttcttgcatgaatgagattccctttttttccctctgccataggatcctcttattgtccctactggaagcaacatgcagaaggcaggaatgatgacaatatacaaatacgtttcctgccatgtgaccaccataagcagcttgcaacatggctcacctagaagttacttactttcaggccagcaagcgtgtttttctatgatgtgtctctttctcttgaaagcacctctgattaagtttagcacaatcagtgtaatctccatttggataaacacaaagtcaacgcaagaggaacctaatttcatgagtgatttcacaccacagttacacatttttttacgttggagaggaaagcaggtgtgcaacggactgggaatccagggtattatcttagaatgttgcctacccatctcaataaacttttacaatagtctttctgctgcttttgttatctgcataaacaaagatatcatgtgcaaataataattaactactttccagctttattcactacaaatattaacatcttttttctggcttaaattatttttcctttatgtaccattttatacattcacccacacatggaacaataaaaatgtatccacttatttaattttggttaaattttcattaaaatgagtgttaaaaataactttttttctgtttgaagagggcttttattgttttactcaagagtgttattttgcccagtgcggtggctcacacctgtaatcccagcactttgggaggccgaggcaggtggatcatgaggtctggagatcgagaccatcctggctaacaccccatctctaacatcgatgactaacattgagatcatcctggctaaaccccatctctactaaaaatacaaaaaattagccgggcgtggtggtgggtgcctgtagtcccagctactcgggaggctgaggtaggagaatggtgtgaacccaggaagtggagcttgcagtgagctgagattgggcggctgcactccagcctgggcgacagagtgagactccgtctcaaaaaaaaaaaaaaaaggtgttatttctggagacaaagttgcctgtgctttaataggtagattatggaaataatttgaaacataaaccataaaattttacattaataaattcagtgcaaagcagaaagtataaatttgctttcagcattttcaaggtgtttagttttctattactcacctaattaaatttgttttgttccaataattgttcttttcttctgaaaatatgtacaaatgcatactgacacaaacacacttactcacttcataattttcttacacctaaggttcatcttcagagtaatatgtgtatatttcactctatgaaaattaaaactaaaactatgttttcaggcagagagaccacatgttcaaagactatatacacattcaactatataacaaatatttattaataatttttcaggactcagaaataaaaggattttatttctatttctttctttttttttgagacagagtctcgtgggagtacagtggtgctatctcaactcagtgcaacctcggcctcctgcgttcaagccattctcctgcctcagcctctggagtagctgggattacaggcacgccaacatgcccagctaatttttgtatttttagtatagatggggtttcaccatcttgctcaggctgctctccaactcctgacctcatgatctgtctggctcagcctcccaaagtgctgggatcacaggtgtcagccactgtgccaaacccatattctatttatatctctgtataatttgtattatgaccataaaaataaccctgcagtcaaaaagaatttaattgtgcattttaaaataactaaaagtgtataattacagtttgtaatacaaaggataaatgctagaggtgatggataccttatttaccctaatgtaattactacacattgtatgcattaatgaaaatatgccatataaggcgtaaatatatacacatactatatacccacaaatactaacaataaatttcaataggaacaaagaataaaaatttaacctatgggaaaaatattcttcaactcatttgcagtttaaagccactgacaaagtgattactagagatgttattccactatgtaccaaatagtatactgctgccatcttttacctacacccttgagtaagttgggataggttaaagttagtcacatttaaaggcttatatttaaagtcaacttaaaggcttatactttctggaagattttttcacagtaattgcacttttaatgcctttattaactatgaaccttcttatattgagtaagatgtgagtgggcattattcctgtaattccaacacactgggagatcaaggtgggaaaaatcacatgaggtcaggagtttgagaccagcctggccaacatggtgaaaccctgtatctaccaaaaatacaaaactagctgggcgtggtggtatgtgcctataatcccagctacttgggaggctgacacacaagaattgcttgaacctgggagtggatggttgcagtgagtggagattataccactgcactgcagcctgggcaacagagcaagagtgtctcaaaaataaaataaaattggccaggcatggtggctcatgtctgtaatcccagcaatttagggggctgaggtgggttgatcatttgaggtcaggagttcaagatcagcctggccaacatggtgaaaccccgtctctactaaaaatacaaaaaattagccaggcatggtggcaggcgcctgtaaccccagctactcaggagactgaggcaaaagaatcagttaaacccaggaggtggacattgcagtgagctgagattaagccactgcactctagcctgggcgacagaaaaaaactccgtctcagattaaataaataaataaataaataaataaataaataaataaataaaattgaataatattcagtaagtgaactagaaacacagacaactaccaaagatcagaaaaatgaaaataacaagaaatattaaaatagcaaaaaaacagaaattgtggatataaaaaatacaaaaaatccctgaaaaatttctttaaaaaatgatgtaaacatggaaaagttgaacaaacaaactaggatacacataaagatatttataacaagcatacatataagcaaaatttcaaaattcacagataagagaattttgggagctcaatgtaggcagatgtatgatgaagaattgttgtatgcaactgaagttaattttttaccacattcagatatgttgttggatcctttagaggttttgtgcagtcctccaaggtaccactaagaaaatatctgtatagatacacaaaagaaaatttaaaaaacctgaaagcatgtcaatacaaaaatcaaaaaaacacaaaaaagacagaaagagaaaatgagagacaaagatacaaaatctaataaaacaattaataaaataccattagtaagtttttctcttttagaaaactatttaaatatatataattatatttccaatcaagagacatactttcaataaaaaggtttattaaaaattctgtgaaatcaagattcaacttgactttctacaagagtcagttgagatctaatgacaaaaaaagactgaaagtggtgagatggaagtagaaatttaatgtaaatattaaccaaattagagcagaagagctcaaaataatattacacaagctacatcttaagtaaaaaactgtcatattttataaaatgtactttaagtcaaaacttcaaacagacaaaaaaggacatttaacaatacatagattcattccctgtgaatgtatgacaaatttgtttatacatgcatgtatttgtgtgtgtgtctcaaattaggctttcagatatataaagtaaatactaacaaaactgaataaacacagagagagcaatataattatagtaggatatttcaataccccactttctgtaataataataaaacaagatgatattagtaagggaacagaggactaaaaggcagtcaaaaacaataatttctaatgaaggtatagagaacactcctcaacaacatcgggatacacagccttctcaatagctcattcaacattcttctttataaaccacctgataggccaaaaacaaagacttaacacattttttaaaaccgaaatttcatagattaccttctacgacaaaaaatggaattagagtataaaacaataatataaataattgataaatttacagctatatagaaatgatacaacacactcttgagcatgcacttgttgaaataactgggctgggtgcggtggctcatgcctgttatcccagcattttggaaggccgagacaggtgaatttaattccatctaaaaaacaaacaattcaaaaaagaaataattaatattgtgaagatttctgtaccgctcaatttaatctacagatttaatgcaatatttttcaaatttctcattgcatttttgaagaaataaaaacagcaaatccaaaagtatatggaatctaaaaaggcaataaagtacccgacaatcatcaaaaaaaggaacaatgttggaggcattaccatttctgatttcaaaacacatcaaaaagatacagaattaaaacaatttggtatgagcataaaggtgaaaaagcagactaataaaatagaatgcagcacacatattaactttcacataattattgcagcattgttactgaaagccaataggtaaaagcaatgcaaatttctgtcaccaaatgattctgtagatataaaaatagtggaatctcgttcagttttcaaaaagcagaaaatattccaacaactattaagataaatattgatgacattgtgcaaaataaaatgagccagccacaaacagagattttataagcatttatacccttagaaagagaaaacagagtagtgtttgaaaagtgccacaaaatgggaagaattggtagttgtttaaggtgtatagagctttagctttgcaagataaaaacattctaatgatatgttacataataatgtcaatataattaatatgaacaaactgaatatttagaaatatatacttctcactctgtctcccaggctaaactgcagtggcacaatatcagttctctgcaacctccacctcccaggtttaacaaattcccctgcttcagcctcctcagatgctgggatgacaggaggatgccaccattcctggctaatttttttatgacactgcgccctgcctagaaatattttaatgtaaattttgttatgtgtttctgacacataacacataagtaaaaatcaacaataccagcctggccaacatggtgaaaccttgtctactaaaaatacaaaattagccaggcgtggtggcgcaggcctgtaatcccagctattcgggaggctgaggcaggagaatggcttgaacgcaggaggcggaagttgcagtgagctgagatcccgccgttgtgctccagcctggtcaagaagagcaaaactccctctcaaaaaaaaaaaaaacaaaaaacacctgttacaacaaacctacacaacaaatatacaagtgacacaaaactacgggaataatatttatactgaacaaactgcatatttagaaatatatactttttgctctatctcccaggcgaaactgcagtggtacgatctcggatcactgcaacttccacctcccgggtttatgcaattcccttgcctcagcctcctcagtagctgggattacaggcgcgcgccactatgcctggctagttttttgtattttagtacagacagggtttcaccgtgttggccagtatggtctccatcttctgaccttgtgatccacccgcctcggcctctgaaagtgatgggattacaggcgtaagacattgtgtccggcctggaaatattttattgtaaattttgttaggtgtttttgacacataacacataaataaaagtaaacaaaatgcctaaaagagatacggagttattattgtttttaaattatctttaaatccaaaagtgtttcttggacacaaaaataatatagattcacaaataaagagatgttgaaatcaggagaatttttatgactactcacctagacaggattaaaaaactgttacaggtcgggcatggtggctcacgcctgtaatcctagcagtttgggaggccaaggcaggcggatcacctgaggtcaggagttcaacaccagcctgacaaacatggtgaaaccctgtttctactaaaaatacaaaattagctgggtttgggggtgcatgcctgtaaccccagctactcaggagggtgaggcgagagagcgacttgagcccagaaggtgaaggctgcagtgagctgaggtcctaccattgtactccagcctgggcaacaagagcaaaactccctctcaaaaaaaaaaaaaaaaccctgttacaacaaacctacacaacaaatatacaagtgacaccgaactacagggataatatttatacaggcaaagaaacagaaataattgtattggcaatagacatggtttattcatatttaattttgctccacactgtcttaaattgtacagagttaaatattgtcatatacaattataatataaactaaaaaatcaaaacacaattaactggtgtgatgtgatgtacccaagaatacacaacacaaaaatattaaattgcaaaaaaaaattaaaacatggaatgtaaaacttattgaataccataaagtagatcaatgttttcatgaaaggaatcttagcatatagggaaaaagtaatacataggttacttgaagattaaaaaaaaaagaaaaaaaagctgagaacttcccaaattttgatgtaacaaaaaaattttctaacctgtaatactagattcaaaattatcttaatttaaaaagaagataaaaatgaagactttgctaaataaaagttgagtgttcatcaccattagcacagtcctagaagatatactacacgggcttgtgtgctctggctcacgcctgtaatcccaccactttgggaggccaaggagggtggattgcctgaggtcaggagttcaagaccagctgaacaacatggtgaaactccatctgaactaaaaatgcaaaacttagcccagcatggtggcacacacctgtattcccagctactcaggaggctgaggcaggagaattcttgaacccaggatgcagaggttgcagtaaaccaaaatcatgacatgcccctttagcctgggcgatagagaaagactccatctcaaaaaaaaaaaaaaaaaaaaaaaaataggccaggtgcaatggtgcccactgcactccaccactgcactccaacttgggcaatagagtgagactcagcctaaaaaaaaaaaaaaaaaaaaatcaaaatgattgtacataaaacctttaaagttattttatagaatataaaaaacaatatgtaaatctgcataaatcggccaggcacagtggttcatgcctataatcccagcactttgggaggccaaggtgggcggatcacaaggtcaggagttcgagaacagtctggccaacatgcagaaaccccatctttactaaaaatacaaaacttagccaggcacggtggtgcatgcctgtaatcccagctactcaggaggctgaggcaggagaatcacttaaacctgggagttggaggttgcagtaagccgagattgcatcactggactccagccttgacaatagagtgaaactccgtctcaaaaatttaaaaaactgcataaatctgttaatagatacaccatgtaaaataattttaggccaggcgcagtggctcatgcctgtaatcccagcactttgagctgccaaggtgggtggatcacctgaggtgaggagttcgagaccagcctgtccaacatggtgaaactcctctctctactaaaaaaacaaaaattaggcaggtgtggtggcaggtgcctttaatcccagctacttgggaggctgaggcaggagaatcgcttgaactcaggaggtgaaggtttcagtgagccaagattgtgccattgcacttcagcctgggggacaagagcgagaagacttcgtctcaaaaaatcaataaattaaataataattttaatatcaataacaaactggaaaatatagaggcatcatttttgtatttaactgaagttgttatgagattaaaacatatgttttaactttaagatgtatgtaatctccagatttcaagatgatgacaaagataatatttatagaaagtattcaaaataaaatacaaaataatcaaaacaagccagtatgaaattaaatgaaaatttaaaaagaaggctgggtgcagtggctcatgcctgtaattctagcaatttcggaggccgaggtggcagattacctgaggtcaggtgttcgagaccagcctggccaacatggtgaaacactgtctctactaacaatacaaaaattagccaggagtggtggcaggcatctgtaatctcagctacttgggaggctgaggcaggagaatcatttgaacctggcatgtagaagttgcagtgagtggagattgtgccattgcactccagcctggggggcaagcatgagactttgtctcaaaaaaaaaaaaggaaaacaggaaatgacaaaaatataactactacaaacacacaaaacaataacaatataactggtaattacaacttcatttttttttttttgaactggagttttgcccttgttacccaggctggagtgcaatggcatgatcttggctcacagcaacctctgcctcccgggttcaagagattcttctgccttagcctcccaaggagctgggattacaggcatgaaccaccacgaccatctaatttggtatttttagtagagactgtgtttctccatgttggtagggctggttttggactcctgacctcatgtgatctgcccatcttggcctcccaaagtgctgggattacacgcctgagccacctctcctggcccctacaacttcatttctttaagcaatcattttaaacataaattaattaaactacttaataaagtaaaatgcaatcttaggactttggaaggcaaaagtaggctggtcacttgatcccaggagtttaagaccatcgtgggcaacgtgacaaaactctatctcttcaaaaaatacaaaaaagctagctgggtgtgacgcacatacttgtaagccagctacttgagaggctgaaatgagtggatcatctgagtttggtaggttcaggcagcagtgactcatgcaaatcagcctggttgagagagttaaaccctatctcaaaaataaaggaggccaggtgcagtggctcatgcctgtaatcccagcattttgagaggctgaggtaggaatatcacacgaagtcagtagttgaagaccagcctggccatgagggtgaaaccctgtttctaccaaaaatacaaaaaattggccaggcatgctggcaggcacctgtaatcccagctacttgggaggctgaggcaggagaatcacttgaacccaggagccacaggttacagtgaactgagattgcaccattgtactccagcctggtcaacaagagtgaaactccatctcaaaataaataaacatatatataaataaataaaattatgtaaaggaaaagacatagaatgccttagtggttttttaaaaagctttctgtatggtgcctacaagagagtcattttagcattcattcaaataggatgaaagtaacggaagaaaaaaagtatattcaatgaaaatagtaaccccaattgagtgaggcggtcataattatattagatataatacgcattaagccaagtactaccatgagacaaaggttgatattatattattgtaaagtgagttgatttaccaggaatctgtaactataatatttatctatctatatgtatgtgtctatataacatcagggctccaaaatatataaagtaaatattgacaaaactgaagcaagacatacatagcaacacaataattgtagacatcaataccccattttcaataccagaaaatacagataaagaaacagaaaatgtagacaacattacagactatattaattattttgcatatagaggaataattgagaatacataatttaaaaaggaaaaaggcttatttggctcacactttggcagactgtataagaagtgtgtgccagcatctgcttctggtgaggttctcaaaaaacttacaatcatggtagaaggtaaagagtaactggacttattatatggtatgagacaaagcaattgtaaggtgaaggagccagcttcctttaatgaaccagctctcatttgaattaatagagtgcaaactttttggttaccaagaggatgtaccaagccattcatgagaaatttgccctcgtgacacaaacatgtcccaccaggtcccacattcaacattgaggatttatattgcagcatgaggtttggacaacatggacatccaaactgtattatagaccatctaggcttcacagacacacacaaaacgctccagtcaaaaccaagatgatacacaatattcttatttgcatctggtgtattctgttatgacatataccaagttttattaaatttaaaaatactgactgggtgcagtggctcttgcctataatcctaacactttgggagaccgaggttagaggatgcattggggccaaaagtttgagactagtctgggcaatatagtcagatccaaacactacaaacaagcaaataattagccagatgtggtagtgcatgtctgtagtcctagctactcagaaaactgaggtaaaaagatcacttgagcccaggaggctgaggctacagtgggccaaacttatgctactacactccatcctgtgtgatggtaaaaatcttatcttaaaacaacaacagccattattttaaaaagattaaaattttgtataagttgctggctctttaaagtttacagaggaaacagagggcagcaatgtctgaataagtctgtatttagaaaacaacttgtacacatttactcatgcaatgttcattaagcaggtactgtgtgctcaagagtatgatacagagcacagcactgggaataacattatgtaattctcataacaccctgggagcttgtactaaggttttaataaatttcagtatttatataaaaggcccagcatttttatttcttcttgcatttccctatcatcaaaattttaaaaaactatcaagaataaaagctaaatagagacagatataagagatataaaaaggtagagtttaatgtagtttagagaaaatttcattctgtctatatttacttttttgtgacttgtggagcaactactggatatgcaggaatagaaaacaagttcctaaatagaatgtttctgcaaatagtggttttcatagaaaatttaaaaactaagaccctacaatacatactttatttttctcatttatctgcttttgggtttcaggaaattgttagcaccagctctagaaaggcagcaggattcaccagctgaaactctgatctcttctaatcagttctgtgaggcaagactccagggtagggtcagaactaaataaggcctccagaaaaggtcaatctgaaagaactgggccaggaagtaaaccctatgtagaattctgttctctatgtcattgggagatttccgttttcttttttctaatcttacctaaaagaaacttaaatcccagagtctgtaattttaatcttttctagccaatgccctgtcaactttatactacatgataatatgcaatttaaacaaatcccttcagtttttctagggtaattttattagaaaataaatacatacacttaacaaggtgaaagaataaaaattatatggcccagtgcggtggctcatgcctgtaatcccagcactttgggaggctttggcaggtggatcatgaggtcaggagttcaagaccagcctgactgagatggtgaaacctcgtctctactaaaaatacaaaaattagccgggtgcggtggcaggcacctgtaatcccagttacttgagtggctgaggaaggagaattgcttgaacccgagtggcagaggttgcagtgagctgagatcacaccactaaactccagcctgtatgacaaattgagattccatctccaaaaaaaaaaaagaaagaaaagaaattaaaattataataacaattcttctgttcataaatatcccttcagctgtggacttcagaagtcacaacaatataaagaaagtggcaaataaagcccaagattttggacacatctatttgttgtaccaaccatatgatgcataattcaattatttatccagttgctagtctagactgaaagtttctggattgttggaaccatgactgcttcatgtatttttttaatggccatataaattggaagctactagtttatctgtttgggtctccagatcttctccttgtttatcatcccagtaccaggaaactagagaaactcatctgggtaccaaccaaagacatcttttatatgaggggatgaacaaacacaggatgactcatttctcttacactgagacagaagcagaagtaatcactcttgtctgctctggacatcctcaaatgcttcaaagacacctaggtgactgagagaattcccattgacctggggctgatggcccagtgataagccaggttggagagactcaggccgattctaaataaaaaatggaactgccttggtggagctcaaaaacctggatcacccgtcctgatttgctagctcttgggtaaaagaaagaacaaaaatgctctactccagtatcacattttacaggtaaatttagttgtgatcatggttctggatactttgtggcctcgatctctcatgcctaagatgcttatttacacttacagattctgccatcacattctatttcctcctggatcctctcacatcactgtagcagggcaatgaacaaaatgtgaaaaatctcaaaatgccacactcccaaatgggagcttaagatgtcaagactgacatctcacagtgcagaaaatgccttttgttagttttctgtacatctccgtccaaagtccagaccttttttgtaaattccaggcagagggcagaccttatctgcagattctaggtaggatcaacctggctctgcatcctatggtgttacagtaagtggagtacaaaggagggatcccctcatagaggctgctctagcacattctaaataagtctaaatggaaaaaaaaaaagctgatgtaacatgaatgtaagtagacagtttatttgggtcaactttagattataaactgggagcaaatattcaagttgccttaaatctacactttgattagcagcagttacaagaagatttgtaaagacaacaagagaaagagagagagtgggctgacacaaagttgtttttcagaaaattttatttatttacagaaatgactttgattattgattagaaatatatggttatggtttagggtatgggatatagggtccaaggcagcattattagtttattttatggctacttgtggcaatagtgaacagtttcaagagataaatacatagttcaaaggggggagaaagacataactgcactttcattttaatgtctgagtttgataaccaaaagaacttgcatttttcagataaacgttttttatttcccaatctcaagactgggattcaaaatttggagctgcagatttagggcctgaatgtctgaagtagcagcacgtgttacctgcaaatttgtgagcattttagcaagaggaggaagaagaaagtagagatcctcttgtctacatgtctactcaatgcacacgttactttaattggatttgtgggtcccatgatctctgaatcagtttcagatctgaagatacaagagtcagtgaaagaggtaaaatgactgattactgtattgtgaaatttatagaaatctgatctagcctctctagaagtgactgtagaggactatagataccaaataggcagagacacaattcttcctgcatatttatgggacagcatgcactgtgctgcacaactgtgagttcactagaagcctgagagggagtctcctctggagtaaattctggttggcaccttatgtgtttatattatgtctggtaattctagacagtgttttgaaacaataattaaaagaaaagttttctccatccccagaagaatgccacaatagaacagaaagaaaatggttttattacacaattaaacttgaatgtgacatgcatcatagtcaatctgcttaacagactgcaataataaaaagacggacatcataattagtccacaagtagaatttacagcaccatgtcatacatagttcattctaaattcacctggagattgaagaggtcatctgtgtatgctaattgcttatattcaatgataaataatcttttcacatcttcataacaggaggtagtttagcaccttgaagccaggtacctgatgaagctaggctttcactctgctacaaaaatggttgaatagggttctatgtttttggctatttatattttagagcagtggttctgtactccctggcactgggctacagcactcctgcttgatttcacctggttgctagtgtcctcttgacttctaccatctgtcactgaggaacagcccagagcacagctcacattttatgtgaagtctatttgccacagcagcactctagtgtcacatcagagagggaagcctgagctgcaggaggagagcctgcaggcctcctgggtagaatgacacattcacaataatggaaatgagagcagtgtttcagcccatttctacttataatggtgaccagggaaaaatactgctgattttccagcatgaatccagatagagatagctccagaagttctcactgtgacagcccagcttattccaaaatcaagggttatgaataaggcttctgaaacagagacccaaagcactggagagaaaaacagatctccgtcggagcaagatggttctgagagaaaaaagttaaaatgatcttaagaaaaatctcagactacatataacattgattatgtcagatagaaaatattcccctaaaagaaatttctctctaaacacctaaagtgtacagctactctcaacatgagaaacatgagcattatgaagaaagggggcagattttcagaagaattttataaagtttcttttctatctctgctgttctctcatctcctagccattgaatgggggttctacgttgaaatatatttgacaacttccaacaacactttctgatgaagaaatagaatctgactgtgttcatatagtggaatatgttagaacttgcaacacagctaactgaagagctattatggtttttgcatggccacatcacctaaccttatttgtcctgcaatagcagcataccaatttagtgaaataaaatatactaaaatagtgtttactcaaaattatctctattgaataaagtaacaaacatgtcacactaatatctacttactgtaacaatttggtagtaaagttcctttggatattaaatataaatatcaaagtataaataattttaatgaactagtgttaatgtagatagcatttaaaaaattaaaacttcagttaaaacattttatatttcaaaagtataaataacaatattaaaataaccatttaagtgattcattcaaagtaagtagtgcagctttgtattggtactattgtagaaaatactgtttctggcttatgcctgtaatcccagcacttaagaggctgaggagggtggatcacctgaggtcaagagttcaagatcaaggtggtgaacatggtaacaccccatttctactataaatacaaaaacttagtcatgcagggtgaggcatgcgtataattccagctacttgggaggctgaggcaggagaatcacttcaacctgggaggcagtggttgcagtgagctgagatcacaccactgcactccagcctgggcaacagagtgagactctgtctcaaaataaaagagaaaatacagtttaatgtacatgaatgcagattgtccacaaacattacacataattatgctaattgttatgaagtaataaatagaaagcaagatacaactacagactccactgtttagtttataccctgaactgtttttgcttttgcagtataagcacttcagcctgcaaatattggataattaccttggattttcaggtttctgtcaaagaaatatagtatcttttagtctttatcattctgtattgctaaatttaatcttatctttgtgctaagcttctgtgtgctcttttttttaattattattatactttaagttttaggatacatgtgcacaatgtgcaggttagttacatgtgtatacacgtgccatgctggtgtgctgcacccattaactcgtcatttagcatttggtatatctcctaatgctatccctcccccctcccccctctgtgtgctcttaaaatgagctcttatctaaacaaatctgtctactttaaaggactaaaaatgaaaaaaataaacttttcagaaccgaaaacaaagcaataaatctgaattatcagataatctgaagacagaaaaaatgacaaaagtcttatttagttgttaatatgatttacatatatttccaaaagcagagaaaaatatctatatataatctagatccctcaacaaaagagggaatagcaaaactttttttggaacttttttttttttgtttgtttgtttcgagacggagtctcgctctgtcgcccaggctggagtgcagtggcgcgatctcagctcactgccggctccgcctcccgggttcacgccattctcctgcctcagcctcccgagtagctgggactacaggcggccgccaccatgcctggctaatttttttgtacttttagtagagacggggtttcatcgtgttagccaggatggtctcgacctcctgacctcgtgatccaccctcctcggcctcccaaagtgctgggattacaggcttgagccaccgcgcccggccttttttcagaactttttaatgagtttttgaacccttggacatctgaaatttgcacactgtatgcacttgaaagaaggtttatggggaagctgggtggggtggctcatgcctgtaatcccaacactttgggagaccaaggcagtcagatcacgaggtttggtggtcgagaccatcctggctaacacggtgaaaccgcatctctactaaaaatacaaaaaattagccaggcgtggtggtgggcacctgtagtcccagatactcgggaggctgaggaaggagaatggcctgaacccgggaggcagggcttgcagtgagccgagatcgcgccactgcactccagcctggtcaaccgagcgagacactgtctcgaaaaataaaaaataaaaaataaattaaaaaaagaaggtttatggggaaaaaaaacccagaagataaaaagatattacataaaatccataaatactcaagaccaattaaacagaatagagagcccagaaataatgccaccttcctacaaccatcagattttttacaaagttgacaagaagaatgtgggaagatttttctctgtaataaatggtgctggaataatagctaacactatgtagaagacagaaacttgaccccttcgttgcaccacatacaaaaatcaactcaagataaaataaagacttaaatgaaaaacttaaaattataaagaaaccctgcaagataacctaggaaataccattcttgacacagaaacaggtaaagacttcatgatgaaactacaaaaaccaactgcaacaaaagcaaaaattgacaaatgggacctatttgaacttaagagcttcttcacaggaaaggaaactatgaatagagcaaacagacaacctacagagtaagagaaaatagttgcaaattttgcctcttacaaaggcctaatatacacaatttattaagaactgaaatgagtttagaagaaaaaaccaagaaacctcattaaaaagtaggcaaaaaatatgaacggatgcttttcaaaagacatacatgtggctaacaaacattatgaaaaaaaggtcactgctaatcattagagaaattaaaagaaaaacacaatgagaaaccacctcactcacacacgtcagaatggctatttttaaaaagtcaaaaaataacagatgctggcaaagttgcagagaaaaaggaatgcttatactctcctggtgggggtgtaaattagttcaacaacttaaaaagcagtgtggcgattcctcacagaactaaaaacagaattatcatctgatccaggagcctcaaaactgggtatatacccaaagaaatataaatgtttatattataaagacacatccacatgcatgttcactgcagcactattcacaatagcaaagacacggacaggccctgaatgcttatcagtggtagactggataaagaaaatataatatggtcagatgcggtggctcatgcctgtaatcccagcactttgggaggccacagcaggtggattgcctgagcttagaagttcgagaccaacctgggcaacatggcaaaatcctgtctccacggaaaatacaaaaagaaaaattggcaaggcatggtaacacacacgtttagtcccaaggttgaggctaaagtaagccaatatcatgccatggcactctggcctgggcaataaatgaaaccctgtctccaaaaataaaataaaataaaagatttagtaaaaacaaaatatggtacataaatatcatggaatactctgtagccattaaaaaataattatcatgtcctttgcaagaacatagatgaagctggagaccattattcttacaaaactaatgcaaagtctgggcgcggtggctcacaccggtaatcccagcactttgggaggcggaggcgggctaatcaccggaggttgggagattaagaccagactgatcaacgtggagaaaccccgtctttactaaaaatacaaaattagccaagcgtggtggtgcgtgcctgtaatctcagctacttggaaggttgaggcaggagaatcccttgatccccggaggtgaaagttgcggtgcgctgagatggcaccactgcactccagcctgagaaacaagagcaaaactctgtctcaaaaaaaccaaacaactgggccgggtgcggtggctcatgcctgtaattccagcagcttggggggccctgaggagggtggatcacgaggtcaggagatcgagaccatcctggctaacacggtgaaaccccgtctctactaaaagcacaaaaaattagccgggcgtggtggcgggcgcctgtagtcccagctactccggaggctgagggaggagaatggcgtgaacctgggaggcggagctttcagtgagcagagatcgcgccactgcactccagcctgggtgacagagcgagactcggtttcaaaaaaaaaggacaaaacagcacaacaacaacaaaaacagaaaactaatgcagaaacagaaaaccaaatgcatgctattatttttaagtaagagctaagtaataagaacacatgaacacaaaaaggagaacaatggacactgaggcctagttgagggtggagggtgggaggactcagaggatcagaaaacatacctgtttggtgctatgggtagtacctcagtgacaaaataatctgcacaccaaaccctcatgacataattttagctatataacaaacctacatgtgtacaccaaaccagaaataaaagctaaaagaaaaaaaaaaatccctgcgtgggagagtacaatgcaggtgtatgaactgattttggctacagatagtggcccaggtggaaatgtactctgattgatttcggtgtgcatgcaggcagatgagattaaacaggtggctcagaaccttagggtggtggagaaaacaggttgctgctgcagattcagtgtctgggggtggggatatgccaggagacttgtagagacttgtgggttcttggcaagaaacacctggatcaaaaatgccatggtggccaggtgccatggctcacccctgtaatcccagcactttgggaggccgagacagatggatcacctgaggtcaggagtttgaggacaggaattcaagaccagcatggtggaaggcgcctgtaaacccagttactcgggaggctgaggcaggaggatcacttgaactcaggaggcagaggttgcagtgagccaagatcgtgccactgcacaccagcctgggcaacaagagtgaaactctgtctcaaaaaaataaataaataaataaaaatacaaaaaattagccaggtgtggtggtacacacctgtagtcccagctactccggaggctggggcaggagaatcacttgaacctagtaggcagagattgtgtaatggcctaaggcgttcaccttgccctttgcctagacagagcccattcatcaatacaggagaatttgtggagaaaatattaaacgttaaatttcaactcaattgaacatggacacaaacaatggttaccaagtcctgggacaggttatgtgagccccttgaggcattcatccagcactatttttgagaaatctctgtttgaaatgcttgttccttggtgccataaagaaatagcacttgaacataaatttaatttactcagtaaggccatttttactttctgcagaaagggtacacttaccagcagttttgccatgagtgtacaccgaacaaaggagacagggtcacttataaccagatgcatcaactctactcctgtgttgttttcactggctgggactggacctcacattctgtatttgtctcgattggctagcaatgtagaactttttaaaagaggcaaacgcagaggagaacagaggaaggaggaagtaacttgtagaatgctgagaaaggtaaaaacaccttcaaataaggaagaggaacaggctatgacctaatgcttgcttggaccagtataaacatgccagagcaaatatttaggctaaacagtgggagctaagaacataaagtacattgatttctttattatggctagcagatatttaagaatattagcacaggtctttcaatacattttacttctaagagaagttactatttactcctaattagatggggaggaaagtctttgaagagaaacctctactttacttttacatctctattttaatctattcctctacgttagttattgaaaaacaatagacaattgcaaaaaaacaagttcacctatttgtgttcctggagcccattcacaaagggccctcgtgactgggcctcatgccaaacaagttgttacaaaaagagctagggccgcagactgccctagcttcaggagacctctcctcatctgtgcacggttgagtgtccgactctggagcccaggctatcacttcccggtgtggtggtgaatcctccatagtctgatgagtgtttttgtctgactctggagcccatactgttgcttcctggtctggtgaggaatcctccatagtctggtgagtgtaaacatacacacacacacacacacacacatatatacacacacatatatgtacatatacgtatatacatatatgtatatacgtatatgtatatatacatatatacgtatgtgcatatatacatatatacgtatatacgtatgtgcatatatacatatataggtatatatacatatatgtacatatacatatatacatatacatatatacatatatacatatatacataatacatatatacatatatacatatatacataatacatatatacatatatacatatacgtgtgtgtggtcatgtgtgtgtatatatgtgtgtgtgtgtgtatatatatcacttttcccttctcccctttccattgcaattttcttattatatcaatttgcttattatatctgcattgccatttacataagataaagcttctttacccttaaaggtattgtgtgtgtgtctttctttctcccctcatgagtttcctgaacagaacaccatatttttcagaggctttatttgtttcttattattcttttttccttaatcttgcctgcatgcctaattttgacaaggtgctattcaaactctgatatcctttcttctgcttggtgaattcggcttcaaatacttttgtatccttcatgaagcataaaacaaaaactaactgggcctttggccaggcatgatggctcaagcctgtaatcccagcactttgggaggtcatggtgggtggatcacgaggtcaggagtttaagaccagcctggccaagatagtgaaaccccatctctactaaaaatagaaaagttagccaggcatggtggtggaggcctgcgtcaggcctctgagcccaagctaagtcattgtatcccctgtgatttgcacgtatacatccagatggcctgaagcaagtgaagaatcacaaaagagaaaatggccggttcctgccttaactggtgacattatcttgtgaaattccttctcttcgttcagaggcttcccaactgagcaccttgttacccccgcccctgcccacaagagaaaaaccccctttgactgtaattttccactacccacccaaatcctataaaatggccccacccctatctccttttgctgactccattttcagacgcagcccacctgaacccaggtgattaaaaagctttattgctcacacaaagcctgtttggtggtctcttcacatggacgcatgtgaaagcctgtaatctcagatactcaggaggctgaggcagagaattgcttgaacctgggaggcggaggttgcagtgagccgagatcgtaccactgcactccagactgggcaaaagaatgagactctgtctcaaaaaaacaaaacaaaacaaaaacagaatacagaagatctttcttccattttgactgtagaaaatgaatgtatttccactggaaaatgtggtagataattgatgagtaacatagattcgtcaaactatccgtttctctttttgcagggtaaatttgtgacagtgactatctcggttctgtatcttgtcttgatttcttagtttaatgctaaattatatgtggtgaaacgtggtactgttagatatgagttctaaatgtcttttcaaagagtcaatatgtcagtatgttcaattctttgccttctacttataaacttaacttcctcgtaaagcaaactttttcaattacctgctccacctgactcatttcaatcacctgctccaacctgactcattcccattacctgctacctgctctgccctgactcattttttccccacataaccattttttttcccgccaaaccactcacccaatcactgtctttaaattagctaagtggaattagtttagcctatgcagtctaaccctagccaataggggaacgacacagcaacaggggccatgcgcgtcagggataagaacccctttccctcccttgtccaggtgtgcactcaccattgctccatttgtaaaggcacacccttctatagaattaccttgccttgctgagaattaaaaagaaaattttatattcgagtgctatttcttttgcggcacagaaattttatttataacaatttgggggttcgcttgtgattacattcccctccaggggtggtctctggttctctctcatgaggaggtttgccctgcccccttgtggtggcctcaggggtgagaaatccagacccactcagtgggaaaaataaccggagctctcagcaacgaggggaaaaaaaaactggccagtaacctagcttaaaggatcctcatatactgtggcaacaactctgtgcacagacccaggaaggagaagctgcgggagccagaaaagtacttcattggtggtcaaattctggagagctaaatgtgtttgtgcgtgattgatcacaaacaaccctgcttgcgatgttgttcgtgtggatggtgacaagtcctactgctgaatggagtgagtgggtcctctctgtggttccgtagctacctcatatgacttagggtggatcctgccatgagatttattctgacatgccaacactaagaggggcctaattctcccttgggggagcagccagagagaacaacacgaatgggaagtgcgcaaggaaagagggggaaagggaggaaacaggttaactttctgggacaggcaaggagagacatttctggtgtcaggggttgagacttccgggacaggcaaggtgagacagccctggtttgaggggttgaggcttctgctaatttcaagggttgaacctcacacaacccccctttccttttatcttgggggaagaaagagtagctccactcccgctggtccctcccctaggggaaggagaaggagaggacagaacagcagcataagcatctgggagaggcacggaaagaccagaagagagatgagacagagagaaagacagaggggaaagagagagaaagagaggcagagagagagagaggaagagacagagacaaagagggagtcagagagagagacagaaagtcaaagagagaaagaaagaagtagtaaagaaaaaacagtgtaccctatttctttaaaagccagggtaaatttaaagcctataattgataattgaaggtcttctccgtgactctataacactctaataccaccttgttgtcagtgtaaacaagggcgcagcccgaaagcactgaggtcactgacaacctgtagccttcctatcaaaaatccttaacccagaaacctgtggatgaaggtaattcattcaatctgtagtgacaactgctttgcccgtaatgcccaaccttgtttttactaaccctgtttttagactccccctttttctcccttaatcacctagccttgtttccacatgaataaaaccctccctgggccaggtgcggtggctcacgcctgcaatcccagcactttgggaggcctaggtgggcggatcacgaggtcaggagatcgagaccatcctggctaacatggtgaaaccccgtctctactaaaaatacaaaaaattagccaggcgtggtggtgggcacttgtagtcccagctactggggaggctgaggcaggagaatggcatgaacccgggaggtggagcttgcagtgagccgagatcacaccactgcactccagcctgggcaacagagccagactccgtctcaaacaaacaaacaaacaaaccaaaaactctcccttagctgagaaagctagacaaactccatctggcccccttgatttataagacgttaaggactccttacccacccccttcttcaaggagttaacttgtgtaaacagattctcaacatatcaaaagagtccaattaactgataaggtactgaaacaaacaatgtatgaagttcccaggatcttgctcaaaagataacaccacaaagccttgagtctgtgtccggcatagcacccatatctaacatcttatgaaggatttagagcccccgcacctgctaccgttgcttttctgtaaacatttgtcttttaaattgtctgtttctctgtaatcatttgtccttttaatttttgcatgtttttacttctgtagaattgttgcatttgagctcccctccccttcctaaaccaaagtataaaagaaaatcaagccccctcctcatggccgagagaattttgagtgttagtcatctctttggccacaggctaaataaaggactcttaattcatctcaaagtgtggcgtttttctaactcgctcgggtataacatttggaggccccagcgagatatattccccaccgggtgagagccgggctttctccaggctcccccagacagatggctggcttattggggggtgccacctgaaaaatttttccaggtccgttaaaagtgaccatcttccggaggagagcagattgactaccgtgtgtttgcccacaaaattccacctctgagtcctcaacttctgaccctggggtcaggtaagtcaggcttgactttgccctggactcagtccatatcccaggtgctgggggactgagtcctggtttctggcaggccagtctctctctctctctctctgtctttctctctctgtctcattaaagactagtctcactctctgctctctttctcactctcactctccctctccctttttctatttctcatccttctcttgttcaggtttcttggagatctccgggaaaaaaaaaacaaacaaaactgttataaactctgtgtgaatggtgagtgattgggtgattgtggaagacaagggcttgtgcttgtcttccagtttgtagctccatggcgaaagctacacagcttgagtgggccctcacctgtggttccatggtgacctcgtaaggcttaagaggcatagcttgatctgagccgggggtttataccagcctgccagtactaagaggagcccaagtcccccaagggggagtggccaggtgggcatctgaatgatcccatcatgggaccccctccccttgtctgtctaataaaaactgtcataattgtttacatgccctagggccaattttttgttttatatttattgctctgctcagtgtctattgtcttgttcagtggttgtcaaagttttgtatgtcatgtcattgatattgcccaagacatctgggtaagaacttcttcaaggtccttagtgttgattttttatcacaggaggttaaatttctcatcaatcatttaggctggccacaacagtcctgccttttctgtcagaaacaagtgaggtgttgttacggaaacgagtgtggagaacattcgcctgattgggatttctggcagcgtgaaggttgctggtatttagattgtcataccctacatccaagagctgggctgcctctaggttaaactggtggtgggttgaaaatagccaccctgcagatttccttgcttacctcttttgtcatactgtaacttttcccatgcccttaaataggacactgtgtagggaaacctacacctgtactgctttacttcatttagatccttactctgttcctctgtggctactctcccaccttaaaaatgatccgagtggcctcatccctgccccttaccctgtacatctcattttccagtgccacagcaagttcagcatctccaggacttggctctgctctcactccttaaacccttacagaaaaaggctgagtttgagctatttgcctttgagtcatggagacaccaaaagtatttagggtacaggtccagaggaagagggagaacgcctagatccaactgacccaggagacctcagggcagcctctagtccccctccctcaatcttaaagctactgtaatgtggcaagtggtattagctgttgtggtttttctgctctttctggttatgttgattctgttctttcagtactccagccccctagggagtgagtttctctgtacatgctgggtttaatatctattctcaaatcttaataaattgccttcaaaaaaaaaaaaaaaaaaagagggaaactccttctctggccttgtaagtgttggagccctctccaatgtatgccacagaatttttctctcggtttctcagaggattatggagtctgccttaaaaaaggcaagctccggacactctgtgaagtagaatggccaaagtttggagtcgggtggccccgtgtagggtcactgaaactcacaattgtccaggctgtgtggcaggttgttactgaaactcccagccaccccgatcagtttccctacattgatcaatggctgagtttggtcaggagcccccctccatgggtgcgctcatgcaccattcataattctacctccaaggtcattctgagccagaccgcattttcacctcgaccctcagccagtctgacttccctgtactgcctccctctgaagaagaggagagtctccctcacccagtcccgctgccttacaaccagcctgctcccatagaatcatcctttgtctcctcaactacttcccctgtaggctcaccgcctattgcttcttgactgtgaccacggtaggaggaagtagcccctctactaccactgagagaggcacaagtccctctgggtgatgagcgctcatctcccttcttggtttatgtccctttttctacttctgacttgtttaattggaaaacccataatcctcccttctctgaaaagccccaggttttgacctctctgatggagtccgtactccggactcaccggcccatctgggatgattgtcaaaagctccttttaacccttttcacctctgaagtgagggaaggtatctgaagagaggccaaaaagtacttcctcacatcagccaataggccagaggaggaagctagagacctccttgaggaggtctttccctctacccggcctaattgggacccaaattcctcaagtggaaggagagctttggatgatttccagtggtatatcctcgtgattattaagggagctgttcagaaacccataaacttgtctaagatgactgaagttgtccaggggcctgatgagtcaccaggagcatttttagaacgcctccaggaggcttatcagatttacaccccttttgccccggcggctcctgaaaatagccgtgctcttaatttggcatttgtggctcaggcagccccagatgttaaaagaaaactgcaaaaactggagggatttgctggaatgcatatcagtcagcttttagaaatagcccaaaaggtttttgacaactgagagtttgaaaaacaaaaacaagcaacataggcatctgaaaaaggtgctgataaagtattcaaaagacaagcaaaaatcttagtgatggctatccaagaggggaaaaagaaaaggcccccatcacagagaaatggccagggaaccttgggttcccaccataaaggtaaaggagttgaacaggctcctctaggaaaggaccaatgtgcttattgcaagcagactggcagtggaaaaaggaatgcccactacgaccagaagaaaaatcagaaaagaaaaagtcctcaccctacctgtaatggaagagcctgatgactgaaggggccagggctccctcactgttggctcccaggaacccatggtaactgctacagtggggggccagcctgtacgcttcctagtagataccagggtggagcactcggtactgtagacccccttgggcagtgtctcaaataaaagtgactgtacaagtcactggagcaactggagctattcaagaagatcctgtcacacactcatgagaagtgagcttgggacagaaaagagtgacgcagtcatttcttgtggttccagagtgtccttttcctctccttggatgagacctgctccataagttacaggcctcaatctctttctcagctcaataggctcacctcacactaggaaatacagctccctccactgcccaatttctgctaagtacccctctgtcggaggaatagcttttagtttcaccatcacaatcaccggaggagaataataatcctcttcttttggacttacagacactttttccctgagtttgggccgagccaaaccctccaggactggctaaacaccattcaccagtggttgtagaactcctggccactgtcatgccagtccaggtgaaataataccccatgagtcagggggcaagacaggggattaatccccatatttaatgactgttacaagctggcatacttacaccatgtcagtctgcttggaatgctccattattgccagtccagaaacctggaacaaatgattactggctggtacaggacttaagggaagttaacaaatggactgttactgtccatccaaccgtccctaatccttatactctacttagcctgctctcaccagaacatacagtatacactgtccttgacctaaaggatgctttttttgctattcctctggaccccaaaagccagccgatctttgcatttgaatgggcagatcctagctcagggaacactacccaactgactttgactcagttacctcagggttttaaaaactcccccaccctttttggggaggctctccagcaagatcttgtaccattccgagctagtcaccctaactgtactcttcttcagtacgttgatgatcttttattagctactggaactatggacagttgcctgcaacatatgagagacctactttacctccttcaggagctcaggtatcaagtctccaccaaaaaggcccagctctgtcttcccagagtgtcttacttgggatacgagataaaccaaggaaaaagggcactcaccagtgcccagaaagaagccatcctatgaatccccgctcccaccaccaagagacaggtacatgaattcctgggggccatgggatactgctgcctctggatattggggtccacagagattgccaagcccctgtacactgctacaggaagaaacggcccactggtttggacagacaccgaagaacaggcttttcaaaacctgaaaaaggcattaactgaagcccctgctttagccctcccaaatatctcaaagcattttcacctgtttgtccatgaaagccagggagtttctaaaggggtgcttactcagactttaggaccctggagatgcccagtggcctatttatctaagaggctggatcctgtggcctctggatggccaagttgtctgcaagccatagtggctagagcaatactagtccaagaggctgataagttaactctgggccaaaatttaacccttatggctcctcatcccatagagactttactatgaagtgctcctggcaaatggatgtcaaatgctcacatcttgcagtatcagagtttactgttagatcagccttgtttgactttctcccccacaaggtgtttaaatccagctacactactccctgatccagactccactactcctgttcatgactgtcaggatctgttggaaactaccaaaactggccaacctgatcttcaagatgtgcccctagaaaaggcagatgccactgtgttcacagatggtagcagcttcctcgagcagggagaacgaaaagctggtgcagctgttaccatggagacagacatgttgtgggcttaggctttaccagcgaacacctcagcacaaaaagctgaattgattgccctcactcaggctctccaatggggtaagaataaacgtattaacatttacactgacagcaggtatgcctttgctactgtacatgtacatggagccatctaccaggagtgcaggctactcacctcagcaggaaagactcaaaaacaaagaagaaattctagccctgcttgaagccgtatggctccctcagcaggtggctgtaatccactgcaaaggacatcaaaaagaaaacacggccattgcccgtggtaaccagagagctgattcagcagctcaggacacagcatgactttcaggcacacctctaaacttgctacccgcagtttcttttccacagccagatctgcctgacaatcccacatactcaacagaagaagaaaaactggcttcagatgttggagcaaataaaaatcaggaaggttggtggattcttcctgactctagagtcttcatatccagaactcttaggaaaagtttaatcagccacctacattctaccacccatttaggaggagcaaaactagcccagctcctctggagcctttttaagatcccccatcttcaaagcctaacagatcaaacagctttccagagcacaacctgcacccaggtaaatgccaagcaaggtcctaaacccagcccaggccaccatctctgaggaaactcaccaggaggaaaatgggaaattgactttacagaagtaaaaccacaccgggccgggtacaaatactttctagtactaatagacaccgtctctggatggactgaggcatttgctacaaaaaaagaaactgcctgcatggtagttaagtttttactcaatgaaatcatccctcgatatgggctgcctgctgcaatagggtctgataatggaccggctttcacctcatccatagctcagtcagtcagcaaggcattaaatattcaatggaagctccattgtgcctatcgaccccagagctctgggcagatagaacacatgaactgaaccctaaatacactcttacaaaattaatcttagaaacctgtgaaaattgggtaagtctccttcctttagctctacttagagtaaggtgcaccccttaccaggctgggttctcaccttttgaaatcatgtatgggagagtgccgcctatcttgcctaagctaaaggatgcccatttggcagaaatatcacaagctaatttattgcagtacttacaatctctccaacaggtacaagatatcatcttgccacttgtttgaggagctcattccaatccagttcctgaccagacggggccctgccattcgttccagccaggagacctagtgtttgttaaaaagttccagaaagaaggactcactcctgcttggaagggacctcacaccatcatcctcacgacgccaacggttctgaaggtggatggaattcctgcttggattcatcactcccacaacaaaaaggccaacagagcccaactagaaacatgggtcccgaagcctgggtcaggccccttaaaactgcgcctaagccgggtgaagccattagattaattctttttatttacctctcttgtttctttttgcctgttatgtcctctgagccttcctactcctttctcctcacctctttcacaacaggacgtgtattcgcaaacactacttggagggccggtacctccaaggaagtctcctttgcagttgatttatgtgtactgttcccagagccagctcgtacccatgaagagcaacataatttgccggtcataggagcaggaagtgtcgaccttgcagcaggatttggacactctgggagccaaactggatgtggaagctccaaaggtgcagaaaaagggctccaaaatgttgacttttacctctgtcctggaaatcaccctgacgctagctgtagagatacttaccagtttttctgccctgattggacatgtgtaactttagccacctactctgggggatcaactagatcttcaactctttccataagtcgtgttcctcatcctaaattatgtactagaaaaaattgtaatcctcttactataactgtccatgaccctaatgcagctcaatggtattatggcatgtcatggggattaagactttatatcccaggatttgatgttgggactatgttcaccatccaaaagaaaatcttggtctcatggagctcccccaagccaatcgggcctttaactgatctaggtgaccctatattccagaaacaccctgacaaagttgatttaactgttcctctgccattcttagttcctagaccccagctacaacaacaacatcttcaacccagcctaatgtctatactaggtggagtacaccatctccttaacctcacccagcctaaactagcccaagattgttggctatgtttaaaagcaaaacccccttattatgtaggattaggagtagaagccacacttaaacgtggccctctatcttgtcatacacgaccccgtgctctcacaataggagatgtgtctggaaatgcttcctgtctgattagtaccgggtataacttatctgcttctccttttcaggctacttgtaatcagtccctgcttacttccataagcacctcagtctcttaccaagcacccaacaatacctggttggcctgcacctcaggtctcactcgctgcattaatggaactgaaccaggacctctcctgtgcgtgttagttcatgtacttccccaggtatatgtgtacagtggaccagaaggacgacaactcatcgctccccctgagttacatcccaggttgcaccaagctgtcccacttctggttcccctattggctggtcttagcatagctggatcagcagccattggtacggctgccctggttcaaggagaaactggactaatatccctgtctcaacaggtggatgctgattttagtaacctccagtctgccatagatatactacattcccaggtagagtctctggctgaagtagttcttcaaaactgccgatgcttagatctgctattcctctctcaaggaggtttatgtgcagctctaggagaaagttgttgcttctatgccaatcaatctggagtcataaaaggtacagtaaaaaaagttcgagaaaatctagataggcaccaacaagaacgagaaaataacatcccctggtatcaaagcatgtttaactggaacccatggctaactactttaatcactgggttagctggacctctcctcatcctactattaagtttaatttttgggccttgtatattaaattcgtttcttaattttataaaacaacgcatagcttctgtcaaacttacgtatcttaagactcaatatgacacccttgttaataactgaggaatcaacaatttgattccccgaaaacatgggtggtgaatgtaatgcccaacattgtttttactaaccctgtttttagactctcccttttgctctcttaatcacctagccttgtttccacatgactaaaactctcgcttagctgagaaagccggacgaactccatctggcccccttgatttgtaagacattaaggactccttacccacccccttcttcaaggagttaacttgtgtaaacagattctcaacatatcaaaagagtccaattaactgataaggtactgaaacaaacaatgtacgaagttcccaggattttgctcaaaagataacaccacaaagccttgagtctgtgtccggcatagcacccatatctaacatcttatgaaggatttagagcccccgcacctgctaccgttgcttttctgtaaacatttgtcttttaaattgtctgtttctctgtaatcatttgtccttttaatttttgcatgtttttacttctgtagaattgttgcgtttgagctcccctccccttcctaaaccaaagtataaaagaaaatcaagccccctcctcatggccgagagaattttgagcgttagcggtctctttggccaccggctaaataaaggactcttaattcatcccaaagtgtggcgttttcctaccttgctcgggtataacatgctaacagaagagagtatgagattattctgttaaaaaaatgatttatcattaaccaccgtaaatccccttaacccagcaggtttcccaacagggagtctaaaccttaattaccatagaaaagtctgaccagacctaggaggaactcccttcaggacaagatgatagatggttcctcctgggtgattgagggaaaaaggcacaatgggtattcagtaactgataaggaaactcttgtagaagcagagttaggaaaattgcctaataattggtctgctcaaacgtgggagttgtttgcatccagccaagccttaaagtacttacagaatgaggaaggagtcatctataccaattccaagttaatacggactgaacaaggtcttattaatagcaaataataattgaaatcccaaattgacaaggttttcaacaaaagtaaagtttgctgaaagttaacagtgttaacatgtattatcctaacttctaatcttgtggccttaaacagtctagtccacagacaggaaggaagttcgcattggagaagaatggttatcatctttgaaagaaaaaaaagggggggaggagaatttatgtaaaaagggatgttatatggtaaattcttgttctaaaataaattaactgtttgcttaaagaaagggatgtttgcaacaagtcagaaagttgaggcatgtgaagaattatttttgaaagccttgaaaaatgttataaagggaatttatgcaggaaatgttttataatttaaaagtaattaggcgtcctgaatgtaaaactattgaagaaacaatttacttgcaaggtgtgtaaggaaagtaaaatatacttttggtaaaaggattataaggaggcataagaatgtggatttttacctacacttaaaggttaaaaaaatttattttaaaggtctcagcaagttttgaaacattaattgtaaagaaaattctgtgtgtaaacatatgagctaaagttaaaggggtatcatccagtttttctgtgaactggacattaaaataaaagcacaacaggtttttcttaacttgctctttaacaaactttaacaactaacttgctctctaacaaaaattataaaaggttaaaaagagtctataaaaatcttaccttatggtcagacattaaaagttggataaatatgtctacaaggttttattaaagttaagtttaatattaataacactaaatttagcttatctcatataaaaatcatatgggaagcattttaaaatataaaatggtgtttgactttctttggtctgaaatctaataaaaataggtactaaagaaaatttctcaacaagaacgcaccaaggactataaagtccactgttgaggtccccacatttaaaacaaaagatcgatttcttagaaatcttatactaagcgtatcttccactttactttccctcaaaactaaaagtcttttagcacaggtaccacccctagaatttctggtaaaccagcaccagccttgggatcacgttctcatcaaagggtgaaaagaaggaaaactcaagtcagcctgggaaggaccctatcttgtgctgctaactgaggctgctgttcatactgcagaagggggatgcacacatcacacctgagtcaagcaagcgccattatcatcagaatcatgggccattgttcctggatcaagccctaccaaattaaagctaagaaaagctcagtctagctatactttcctttcctttcttaacccagtgcttatattcattactattcctaccactatcaactctaaccccactttagagcacttctatgatttaggagcagaggtcactggaaaggatcctatacgattctttaagatgcgcatttttctccctcctccacctcctacatctgccctgttcccaaacctatgacaccaaactatgcctcacctcatgccaaatgacaaaagcaagctctcggtagtagaaataggagatctgaggcaaaccatagccattgaaacaggatataaagatgtaaatgcctggataaaatggattaaagattccattcacgctttaaacagaagtggctgttatgcttatgcggatggtaggccagaggcccgggctgggcctttccactggggtggtcctcaaatcaagtggacacggagtgcatgaccgctgtttttcaagattccactgcctggaataacgaatcatgccaagctttctctgctatttcctgaagtccaacaccctgtgggtcagcccctgagcgccatccagcctccatcttccaaaaccaattttacatcgtgtctccaatgacaagggaaaaaatttggcattccgtggaaactttacaggatgcagtgaagtccggcatttcctagagctgacccattagtctgctcttattcatccctgagtggatgtatggtagtattatggaggacctttactggacactctgccagataattaagagcagtacttatgctctagttcaattggctatcccttttactctggcatttcctcaaccagaggaaggaaaaataagatatcataaagtgagagaagctccttatgggtcttttgactctcaagtctatttaaacgcaattggagtcccacgggaagtaccagatcaatttaaagcccaaaatcaggccgggcacggtggctcacgcctgtaatcccagcactttgggaggccgaggcaggcggatcacgaggtcaggagatcgagaccatcctggctaacacggtgaaaccccgtctctactaaaaatacaaaaaattagctgggcgttgtcgtcggcgcctgtagtcccagctactggggaggctgaggcaggaaaatggcatgaacccaggaggtggagctttcagtgagccgagatcgtgccactgcactccagcctgggcaacagagcgagactccatcttgaaaaaaaaaaaaaaagcccaaaatcaaatagctgcaagatttgagtcaatattttggtgggtggcaattaataaatgtagattggataaactacatctattacaaccaacagcgatttattaactgcactagaaatgctgttaaaggaatagctgagcaattagggcctattagccagacggcttgggaaaaatagaatagccttagacataatattaacatacagagaaggagtttgcatcatgattaaaactcaatgttgtaccttcatcccagacaacactgcccctgatggaaatacaacaaaggcattgcaaggtctgactgctctgtccaatgagttagccaacaattcaagtgtaaatgacccctttacaagatggctagaaaagtggttcagtaaatggaaaaaaataatagcctaaattcttacttcccttgcagacgtaatgggtatacttcatcttgtcaggtgctgtgtcacaccatgactccgtgagttggtgcagaggcttataaaaacagcacttactaaaacctcccttaattatccaccaccttatccatagaagcttcttttggaaaatcaagcagaacaactaagccaagacatgttaaaaaaaatttgaaaagaaagggctgtaaggaaatgcaagaggaggggttgttagatatgacttctaaatttcttctcaaagaatcaatatgtcagtatgttcaattctttgccttctacttttaagcttaacttcctcataaagcaacctttttcaattacctgctccaccctgactcattcccattacctgctacctgctctgctctgactcattctccacccggcataaccactttttcctaccaaaccacttaccccgtcactctctttaaattagccaatcggaatgagtttagcctgtctggtctaaccctagccaataggggaaagacacagcagcagggtccacgtgcatcaaagataagaacccctttacctcccttgtccgggtatgcgctcaccattgctccatctgtaagggtgcacccttctatagaagtacctcggcttgctgagaattaaaaagaaaatgttatatttgagtgctatttctttagccgcaccgaaactttataacagtaccttctacacgtgttcccatgtgactaatcttttactgcataatttttaatagaaataataaaataatacatatattgtctgaaaaaagtagatatatttgcttttcttatggaggtgtaaaatgcaagcaacttagccaggtactgtggctcatgcctgtaatcccagcagtctgggaggccaatgcaggttgatcacttgaggtcaggagttcaagactattaggcctctgagcccaagctaagccgtcatatcccctgtgtcccacacatatacatccagatggcctgaagcaagtgaagaatcacaaaagaagtgaaaacagccagttcctgccttaactgatgacattccaccaatttgtgacctggaggggcattctcagtacacttttgagtagaaatgttcaggaagcaggatagtagcctgctgggaacattagtaagaggggctgcaaagaagataatcaaaatattgaataaggtggggtcaggagtttgagaccagtctggtcaacaaggtgaaacactgtgtctactaaaaatacaaaaattagctggtggtcatggtgggtgcctgcaatcccagattctcaggaggctgaggtgggagaactgcttgaacctgagaggcggagattgcagtgagccgagatggcaccactgcactgcagagatggcaccactgcactgcagcctgggcgacagagtgagactccatctcaaaaataataataatttattttggccactgaagacaaactcagctgattgttttaatgagaataaggagaaaatatgcagagtgtgtatctggcattgtgataagtaagaaaagagagcattatctaagtcgtaatgggaagagtgtttctttccacaaactgttactggagcacacaaaggatgtagaattttattaatcgcaaatattttttatgattttgtgtttcatctttccccatctcttttctttgttctatgcatttcttccatttggcttttcctgggctgcattttatatatatgaaaccggtaaacgtaactacagtgttttgctgagttctgtgagtagctctacccaattattcaacttcagggaggttatgggagtccccagtttttaagcagcagctcagaagcatagatgggcccatggggtttgtgactggcatctgcagtgaggacaatgttgtggaactgagccctgaatcagggtctgtgctgactctgggtggtgtcagatttcaaatgttagacaatgagttggtgttggagaattatttgatgttcagcaaactacagatttggtgccagaaaaaagatatcatggagccctggcctggaataaaattctgggtgtttgggaatgggactgaaaacttagaggaaaggagcgctgatgacagacccccttttcttgcagctgttaccacaggattcccacccactcacaaacacacacactagacattgacatgtccacactcctcccaggactaggcaccaccctcaggaacttcaccacggcatttttgatccaagagtttcttgccaagaacccacaagtctctacaaatctggcatatccccctccctggacaccgaatctgcagcagcaacctgttttctccaccaacctagggttctggacctgcttttcacaatctcgtctgcctgcattcacacagaaataaatcagagtacagccccactgggccactatctgtagcgaaaatcagtccacttacctacattgcaatctccccgacccaggaattttttttcttttagctcttatttttggtttggggtacacatgtgggtttgttacacagctatgtcatggggtttggtgtgcagattattttgtccctgagttactacctgtagcaccaaacaggtatgttttctgatcctctgagtcgtcccatactccaccctcaactaggcctcagtgtctgtttctctctctctcttttttttatttttatttttgagaccgagtctcgtactctttcccaggctggagtgcagtggtgccatttcagctcactgcaagctctgcctcctgggttcacaccattatcctgctgcctcagcctcctgagtagctgggactacaggcgccctccaccatgcctggctaattttttgtatttttaatacagacaggatttcactgcgttagccaggatggtctctatctcttgaccttgtgatctgcccgccttggcctcccaaagtgctgggattacagacatgagccactgtgtctggcctgttctcctctttgtgttcatgtgttcttattatttagctcttacttataaataataacatgcatttggctttctgtttctgcattagttttcttttttttgttttgttttgtttttttgagaaggagttttgatcttgttgtttaagctggagtgcaatggtatgatctcgactcactgcaaacttcgtttcctgggttccaacaattctcctgcctcagcctcctgagtagctgaaattacaggagggcgccaccactcctagctaattttgtatttttagtagagacacagtttctctatgtcggtcgggctaatctcaaactcctgacctcaggtgatccgcccaaatcgacctcttgaagtgctgggattatgggcctgagccatcgcctggcctctgcgttagttttctaagaatgttggtctccaccttcatcaatgttattgcaaaggacatggtcattttttgtgtgtgtgtgtggccacccagtattccatgatgtttcgtttttactaaattttgtttagtaaatttttgtttttactaaattttttattttatttttggagacaagcttattgcccaggctagagtgccaaggcatgatattggcttactttagcctcaacttcccaggctcaagcaattctctcctacctcatcctcccaagaagctaggactacacacaggcattaccaagcctggccaatttttctttttgcactttccgtggagacaggattttgccatgtttcccaggctggtctcaaacttctaagctcaggcaattcacttgcctccgcctcccaaagtgctgggattacaggcataagccaccgcatatgaccataccatattaccatattttctttattcagtctaccatcgataggcatttagggcctgtccttatctttgctagtgtgaatagtgctgcagtgaacatacatgtggatgtgtctttataatataataatttatatttctttgggtatatacccaatgatgagatccctgggtcaaatgataattctgcttttagttctgtgaggaatcaacacactgctttttacagttgttaaactatttacactcccaccagcagagtataagcattcttttttcgctgcaacctttgtcggcatttgttatttttttgaaattttataaatagccattctgttggatgcgatgtggtatctcattgtggtttttcttttaatttctctaatgattagcgatgagcatttttttcacacgattgttagccacatgtttgtcatcttttgaaaagaatctcttcaagttttgtgatgttactttttaatgaggttttttttttttttttgtaaacttgtttaagttcttggtttttttttttttttttttttttgtcttttgtttttgagatggagtttcactcttgttgcccaggctggtgtgcaatggcccaatcttggctcaccgcaacctccacctcctgggttcaagagattctcctgcctcagcctcccaagtaggtgggattacaggcatgcagcaccacgccctgctaattttgtatttttagtagagatggggtttctccatgttggtcaggctggtctcaaactcccggcctcaggtgatctgcccacctcagcctcccaaaatgctgggattacaggggtgagccactgcacctggcctaagttcttaataaattctggatattagacctttgttagagaaaaagtttgcaaattatttttattctgtaggttgtctctttactctgttgatagtttcctttgctgtgaagaagctctttagtttaaataggtcccatttgtcaatttttgcttttgtggcaattgctttttgtagattcatcatgaaggctttgtgagtttctatgtctagaatggtattacctaggttatcttgcagggtttcttataattctaagttttacatttaagtgtttaattcatcttgaattcatttttgtacatggtgtaatgaaggggtccaatttcagtcttctacatagtgctaggtaattattccagcaccatttatgaaatagagaattgttcccacattcctcttgtcagctttggcaaaaatctgttggttgtaagagggtggcattatttctgggctctctattctgttgccttggccttgtgcacttatggatttttttataacatctttctgtcttctgtttttttcccccataaaccttctttcaagtgcatatagtgtgcaaatttcagatgtcccagagttcaaaaaatttttaaagttcaaaaaaaattttgctttttctcttttcttaggtatttagattatatgtagatgtttttctctgcttttttgaaatatatgtaaatcatattaacagctaaataaaccttttgtcattttttctcactccagattttctttatctagtacttcagatttattgctttatttttggttctgagggtttatttttttcatttttagtcctctaaagtagacacagatttgtttagataaaagcgcttttcaagagcgcacagaagcttagcacaaagataggattaagttttgtaatacagaatgataaagactgaaagatgctaagtttctttgacagagacctgatgatccaaggaaattatctaatatttgcaggctgaagtacttatactgcaaaagcaagaacagttcagtgtataaactgaagagtggagtctgtagttgtaccttgctttctatttattacttcagaacaattagcatagttatgtgtagtgtttgtagacaagctgcatccatataaattaaacagtattttctttttttaaattatactttaagttctagggtacatgtgcacaacgtgcacgtttgttacatacgtatatatgtgccatgttggtgagctgcacctattaactcgtcatttacattaggtatatctcctaatgctttccctcccccctccccccaagtattttctttttttgagacagagtctcactctgtttcccaggctggagtgcagtggcattatctcagctcactgcaaccgctgtctcccgggttcaagcgattctcctgttttagcctcctgggtagctgggattacaggcgcgcatgaccacgtgtggctatgtttttgtatttttagtagagacggggtctcaccacgttggccagcttgatcttgaactcctgacctcaggtaatccatccaactcactcttccaaaatgctgggattataggtgtgagccataaacagtattttctaaaattgtatgaatgtaaagctgcaatgctgacttcgaatgaatcactttaattgttagtttaatattgttatttatacttttgaaatataaagtgttttaattgaagtatagttgctatttagttatttagagacagagtctcactctttcacccaggctggagtgcactggcttgatctcagctcactgcaatctctgcctcctgggttcaagcaattcttctgtctcagcctcctgggtagctgggatgacaggcacactccacgatgcctgatttttttttttttttgtatttttagtagagatggtgattcaccatattggccaggctggtcttgaactcctgacctcgtgatctgcatgcttcagcctcacaaagtgctgggattacaggcgtgagacaccactcctggctatagttgcaatttaaaaaatgctgcatacattaagactagtttattaaaattattcatacttagatatttatatgtaatatctaaagaaaatttactaccaagttgttacagtagatattaggcttacatgtttattactttattctatagggataattatgagtaaacacaattttagtatattttatttcactaaattggtatgctgctattacaggacaatgaagacaggtgatgtggccacccaaaattcgtaatagctcttcagttacctatgttgcaagttctaatgtgttccactatatgaacacagtcagattctatttcttcatcaaaaagtattgttggaagttgtcagatgtatttcaatatagaacctccattcaatggctaggagaggagagagcagcagagatggaacaaaaacttgataaaattcatctgaaattctgccccctttcttcataatgctcatgtttctcatgctgagagtaattgtgcactttcggtggttagagagaaattgcttttaggggactattttctggctgacttgatcaatcttacatctaatctgaactttttcttaagatctttttaactttttttcctcaaaataatcttgctcagatcaagatctgtttttctctccaatgcttttgtgtttgtttcaaaagccctattcatatctcatggtgtctgaatgaggggagcttctctatatggactctatatagagtccatctctatatggactcatttggaaattcagcagtattttttccacatcaccattataaatagaaatggaggctgaaacactgctcacattcccatgattgtgaaggtgcaattctacccaggaggcctgcgtgctctcctcctgcagctcaggccttgttctctgatgtgacactagagtgctgctgtggtgaatggtgttcatataaattgtgagctgtgctctgggttgtgcctcagtggcagatggtagaggtcaagagaggacactagcaaccaggagaaagcatccagtgccaaggagtacagagccacttcttttaaatgggaaaagtttatttgtattgaatataaggaattagcatacagagatggcctctttagtctacttgtgaagtaattatggtgactatctttctgttgttgcagcctcttaagcagattgatgatgatgcatgtcacattcaagttcacttgtgtaataaaactgttttctttctgttctattactgtagagtttctctagggcttgagaaaatttttctttttctttctttctttttttttttgagacggagtctcactctgtcacccaggctgttagtgcagtggcatgatctcggctcactgcaacccctgccctctgagttcaagtaattctcctgcctctgtctccctagtagctaagattactgtcgcctgccaccgcgcctggctaattttttgtatttttagtacagacggagtttcactacattggccaggctgctcttgaactcctgacctcgtgatccacctgcctcagcctcccaaagtgctgggattacaggcatgagcaaccgcacctggccaaaaatttttcttttaattattgtttccaaacactgtctagaattaccagacatgatataaatgcataaggtgccaaccaggattttctctagagaagactttttctctcaggcttccagtcaactcacacgtgtgttgcaaagtgcatgctgtcccctaaatatgcaggcagaattgtgtctctgcctatttggaatctatagtcctctacagtcacttccagagaggctagaccacatttctacaaacttcacaggggagcaattaaccattttacctctttcaatgactcgtgtatcttcagacgtgacactgatatagaaactatatagaccagaaacccaatcagaataacatgtgtgcactgtgtagacatagagacgtgagaatctccgtgttccccttcctcctcttgctaaagtgctcacaaatgtgcaggtaacacctgctgctactccagccattcaggcctaaatctgtagctccacattttgaatccaggtcgtgagatttgggaaataaaaaacttttatctaaaaaattcaagtccttttggttaccaaactcagagagacattaaaataaaagtgcagttatttctcccctctttgaactatgtattcatctcttgaaactgttcactattggcacaagtacctataagttaaactaataatgccacattggacagtatatcccataccctaaaccataacgatatatatctaatcaataatcaatgccatatctgtatataaataaaaatttccaacaaacaactttgtatcagcccactctctgtccttctcttgttgtctttacaaatcctcttgtaactgctgtgaatcaaagtgtagattccaggcaaattgaacctttgctcccaggttataatccttaaacttgacccaaataaactgtctacttatattcatgttgtgtcagcttttttttttttatgtagacttatcatttagaatgtgctagagcagcctctatgaggggatccctcctttgtactccatttgctgtaacaccaaacgatgcagaaccaggtggattctacctagaatctgctgataaattcaggcctctgcctgggatttataaaaatggccagatattggattgagaatgtacagaaaacaaacaagaaattttcagcattttgagatatcaacataaacatcttacagcccccatttgggagtgtggcattttgaggtttttttacatcttgttcattgacctgctgcggttatgtgagaggctccaggaggaaatagcatctgatgccagaatctgtaagtgtaaataagcatcttaggagtgagagatgaagtccacaaaatatccagagccatgaccacaactatatttacctgtaaaatgtgatactagagtgtagaatattttagttttttctcttacccaagagctagcaaatcagaatagtgatccaggttctggagctccaccagggtaattccctattccatttacattcagcctgagtctctccagcctggcttatcattgaccatcagccctgcatcactgggaattctctcacaatcacctaggtgtctttgaggcatttgaggatgtccagagcagaattatgtcaggctgacaagaacggttaattcggcttctgtctcagtgtaagagaaatgagtcattctgtgtttgttcatcccctcatagaagaagtgccattggttggtacccagatgagagtttatccagtttcctggtacttggatgataaacaaggaggagatctggagacctaaatagataaactagttgtttccatttcatatggccattaaaaaaaatgaaacagtcatggttcctacaatccagaaacgtttagtctagactagcaactggataaataattaagttatgcattatatggttggtacaataagcagatgtgtccaaaatcttgggctttatttaggccgctgtctttatattgttgtgacttctgatgtctacacctgaatgatatttatgaacagaagaattgctataatttctttttttatttttgaaatggagtcttactctgtcaccaaggctggagtgcagtggcacaatcttggctcattgcaacctctgccacccgggttcaagcaattctcctgcctcagcctcttgagtagctaggattacaggtgcctgacaccgcacctggctaatttttgtatttttagtaaagacggggtttgaccatcttagtcaggctggcctggaactcctgacctcgtgatccagccaacttggtcacccaaagtgctgggattacgggcatgagccaccatgcccagccatataatatctaattttttttaccttgttaagtgcatggtatttattttccaataaaattacactagaaaacctgaagggatttgtttaagttgcatattagtatatggtataaagttgacagggcagttgctagaaaagattaaaattagagaaattctaggatttaagtttctttcatgtaagcttagaaaaaacaaaactggtattaccccagtggcatagagaacagaattctatagggtccttaccctgttccagacctgttcatattcacacttgttggaggccttatttagatctgaatctaacctggagtcttgctctcagaactgattagtagagatcagagttttggctggtgaatcctgctgcctttctagagctggtgctcacaatttcctgaaacccaaaagcagataaatgggaaaaatgaagtatgtattgtagggtcttagtttttaaattttctgttaaaaccagtgcttgcagagacattctatttagcaacttgttttctattcctgcagatccagtagttgctccacaagtcacaaaaaagtaaatataaacagaatacaattttctctaaactacattaaactcttcctttctatgtctctttcatctgtctatatttagcttttattctttacagtttttttaaaaatttgctaacagagaaacagaagaagaaataaaaatgctgggccctttatctaaatcttggaaattattaaacccttagtaccagctccagggtgttatgacaattaaatcacataatgtgttacgcccagcacagtgctccatatcatactcttgagcacatagtacgtgcttaataaacattgcattagtacatgtgtacatgttttttaaatccagacttattcagacattgctgccttttgtttcctctgtaaactttaaagagccatcaaagaataggaaactttaggatggagatgggttgtccttatttgtacaagaaatatttggttgtgacaagagttctaagtgtaaggaaccctgtgctgtgcctgctttctctaactaatgctaataatgagcccagtggaagaaacatcagcattgacagggaacttgtttaaaacacccattcatggacccttttcaaacctgcagaatcacattacataaagtggggccaaaattaccaagtgatttataagctcgttaaagcttgagaggcaatgattagctcagtggttatcagcccaggcttctcattaggatcacatggccaatttgcagaaacctcttgtgccctccccacagcttctgtttattgttgtgggtagaaatatccatgttgtttttttttgcctttttttttttcctttttgtggagaacggggtcttgctatattgcccaggaaggtctcaaactcctgggctcaagctatcatcctgcctctgcctccctgagtgctgggactacaggtgtaagccactgcatctggctccatgttactttaatgaagggcctcatgtgactctaaggtgaggtcagaatcaagtatgagggtttcaaaatacattcatgagagttaagttccaactatgccctaaagtgcggtcacaggggcagttctgtttgggtttggtagggacaggtcagtgtggcacatatttgcattactgtagcagaaattgctggtgtctgtggcaggggagggcaactgaggacagaaaaggagaaacttatatttttatcttcatggagcggctcattgttcctgaatctcttctgttttaaaggacagaaatgagtggactttttctgtctttttctgccagttgatgtcatgctagcaggtacatgtgtggtactgacacctttaaaggcatattctcaacatgcaggtgtaatttatccagagaatctcatctgagaagaaattccagagaaggagaagaaagaaaaaaaatggcttttcttcaggtaaacaggtgtcagatgaagagctgtgtccactctgcctcctggactgccatgaatttagtacttacaaaactttatttctctacttgtgtttttcctccttaatgagtttgatttaactacttcttaaaattcttatgatagtcaagagtctctgagaaatatttctttccaatatccagtagccttctctacattttctatgttatagcttcttatatgacatgaagaattctcagcaagaatttatgatacacagtattaaaaatgttccctttgtggctgttgaacagggaaagatgtgggtactcaagatctctattggggaaacttgtggtccatagtacacatggagaacatgtcatgttgaggctccatctgtgtgttccattagctctatgcagaacaggattaagaaaatgctgatttaaatgaaatggaatttattaaccagaaagttctgaaaaaagttatttggagatatctgttttctaggttgccaaatgaagcctatttaaaattactattaaaattacacaacataggagttatctggattttgaagtttgtatacaactgattttttttatggttaaattcagactataatttacttcttttgggagaaatatttcaacactgatgctgtgttcttctatgtgaattagcacatcataaaaatttgtcctagtgcagttagtggttaaagattcacttggtggaatagctctctgatgaattattttcactacagagttaattatttttctcttcatcatgaagtatctttatgcagcggatgtgcatagaccatcacatttaatctggcagctgttcttttttctaattttttctacataattttctttggaaaatgaaggctttcatctttgcttacaggctagaaaaactgggaaaaacatgggctcttccacttactggatgtctgccaaaatatccttcttgggccaaaaacattggcattactggtgagcttgttagaaattcaaaaaatcggccaagtgctgttgctcaagcatgcaatcttaccacgttgggaggccgaggtgggtggatcacctgatgtcaggattttgagtccagtctggccaacatagagaaaaccctatgtctactaaaagtacaaaattatctgggtgtggtggtgcatgactgtaatcccagctactcaggaggctgaggccggagaatcacttgaacccgggagacttaggttgcagtgagccaagattgcatcactgaacttcagcctgggcaactagatcgaaaccctgtctcagaacaaaacaaaacaaaacaaaaaatttgagaggtgccttctaactcaacatgtcttttccatttgaaaaatattcacaactcattctgtatgatgtaaatatagcactcaaaaatgtacatgtttatgtttatggccttaattttatactttattatatggaaaaatataagaactgatattgtggatgttatgctgctcttttttctcagagttagaggatatatcagagaatatttctgtgttgatattattttattggataactttagtcagtcgaataagtcagaaccagttctctttactctctcatttcaccttaagtcaaataaaaaattctgcctatggccacatggtgaaaatgtgtgtgtgtgtgtttttcagggaccattgcaatttagagatgtggccatagaattctctctggaagagtggcattgcctatacactgcacagtgaaattgatatagggatgtgatgttatggaactacagacacctggtcttttttggtgaagatagcattaatatataattcataatatactctgaagagtatattatttctcttttttatagaatgtattatagtagtttattctttgcataaaagagtttcagcgctgggcatgatggctcatgtctgtaatcccaacactttgggaggctgaggcaggtggatcacgaggtcaggagttcaagaccagcctggacaagatgctgaaaccccatctctactaaaaatacaaaaaattagccaggcatggtggtgggcacctgtattcctagctactcagtaggctgagggagagaattgcttgaacccgagaggcagaggttgcagtgagccgagatcgggccactgcacttcagtctgagcaacagagtgagacttcatctcaaaaaaaaaaaaaaaaaaaaaaagagtttctgatccccctttatttgtaaaatcttcagaatttggtaatataggaaagaatttcttcaatatgttttatcttaatccaaactttccacagtactgagatgagctgtattcttcactctaaattagtggtacttccagaaatttagcggcataaaatattgttgccccacctgaaaatctaattgccaccaccaatttttgattcagtagtaccaggtattaaaattaagaaacctacaaattgaaagtattttctaaatatttagaaatttcttttataatttagtattttggtatcaatttactattatattttatcacatcctctctgctgagcacattactagcttgtagttggagaatatgagcaagattcatgttatttattcttaataaaacaggtattgttttctctaagccagacctgatcacttgtccggagcaaggaaaaaaacctttgactttgaagagacttgagatgattgccatagccccaggtaggtgcgagtgaaaatgaatacaacagatgacacagataagaggtcccaaggtcaaagagaaagccagtccttagaatgtgactggggaagctgagttccaaaggaaatagttcctgggcatctggggttttttgtttgttttatttttttaaattttgctctcagaaaggggcatcttttttgttacgctttttgcttttttttttttttgagatggtgtttcgctctcgttgcccaggctggagtgcaatggtgtgatctttgctcaccacagtctccacctcccaggttcaagtgattctcctgactcggtttttctagtagctgggattacaggcatgcaccaccatgcccggctaatgctatatttttagtagagatggggtttctccatgttggtcgggctgttctcgaacttccaaactcaggtgatttacccacctcagcctcccaaagtactgaaataacaggcgtgagccaccacacccagccctgctttatgcctgtaaattctctaaggattctatttttctttcagtgagcttccttcaggtttatactgaaagcaaaattcctcttcatggcatataagagactgcacaatctggctgcttttttattgtttgcaggactcacaaatatttgcatgattttgagaaactaaaactcttttttaggttttttttgcatcagatttgaaatgtgtgagagcagtagtttcttttgcatttttttgttcatttttctgcacagtcctttctgtttttattgctagtcttgaaatatagttggcaattataagtatgatatccttctgctttgctctttttccttgattgctttggctattccaagtttattttagtttcatgtaaattttagaattatattttccattactgtgaaaaaaatagcactgcaattttgattggcattatattgaatctatagatcactttggataatatggcactttagtaatatttattttcaattcatagacataaaatattttaaaatttatttggatcttccctaatttttttcatttttttattgtaaagatttttttacctccttggttaaattttttctcagacatttattatttaatactatagcaaataagatttctttcttttttttttcttttagagatagagtcttgcactgtcacccaggctggagtgcagtggcatgatcttggcttactgcaaactccgcctcctgcgttcaagcaattctcttgcctcagcctcccaactagaagagattgcaggtgcccaccatcaggcccagctaatttttatatttttagtacagatagactttcaccacgttggccaggctggtcttaaactcctgaactcagatgatcgacccccctcagcctcccaaagtgctgggatggcagacgtgagctaccatgcccagcatcttcctgtattttatcagatagttttaagtgtatgaaatcatacgtatacttgtatgttaattttatattttgctaatttactgagtgtatttggtttagacaggttttaatatactgtttatggtttctttgtgtttatttttgaggcagaatctcactttgtcgcccaggctggggttcagtggcacaatctcaactcacttcaagctccacctcccaggttcacaccattctcctgcctcagcctcctgggtagctgggactataggcacctgctgctgtgcccggctaattttttgtaattttttttttttttgtagagatggggtttcactgtgttagccaggatggtctcgatctcctgacctcgtgatccacccgcctcggcctcccaaagtgctgggattacaggcgtgagccaccgcgctcggccctgtttatggtttcttaaatataaaattttatgatctacaaactgcaactttttacttttctttaatttcaatggattaaattttttcaactaattcttctgccacatacatccagtgctagattaaaatagaagcaatgacaatgggcaaaatatagttttatattggtgtctgaatttgatggagcaaacacctcttcaaattttcataaactgatttcagaagataaaaatcttttgttggacccttagggtgatgataagctctctgaatttgtagtgaagaggggttgcagcttggtcacaaggctgctgggtctgctttagggtccaccattagttggcttgttacaggggcttggatagttgtaattcccattttatttgtgaacagaccacatgtttttcaggactttgctccatagggcagacactagggcaggtttttgcagtcggatctgcatatggtgggcctcgtatcaggatgcggatgagtgtagctttcactgagtaccagagaacatttcctcaggtaactgtgtgggtttctatgtaggcagaactgatcataaactgaggctcaggtaactgaaactgagtcattgaactgcttcacagaccccagtaaaggccaaggtttgcaggcctgcctacatggctgtaaatgggtgccttcctccaggtctctggaatggcaggaccttggccagactgtggctggtaggagtttgggataattacagagtaagttcagaattctcagtgggatcaagttgggtgaaccctatcctggtctgtagccaagaacaggggtcatgtagttttccacctgaatgagggcctgccttccgaatagaacacttctcaaccttaagctttaacagtttttcacaactccctccctggatctcaaatctctcatagaggcccttattttggagatgacgtcttgcttcataaccaaggctggtctcgaaatcctggcctgaagcagttctccaaccttaatgtaccatgtagctgtcattacaggtgtgagccataatgactggttctctaataaaggcactttttttttcctctgagatggagtctcactctgtcattcaggctggagtgcagtggcgccatctcaactctctgcaaactccgcctcccgggttcaggcaattctcctgcctcagcctcctgagtagctaggattacaggtgtgtgccaccacaaccgcctaattgttttgtatttttagtagagataaggtttcaccatgtttgccaggctggtcttgaattcctgacctcgtgatctgcctgcctcagcctcccaaagtgctgggattaaaggcatcagccacagcactcagtcaataaaggcatcagggatggctgattttttttgctgtaagggaatatgaaaatagggctcttttaaccttattgatgtcactctccctatacatttttactttctattttctatttcaaattgtctgtaactttagattcagatatttaggacaatatgctagaatttgcatggtatgcctgaagtaaattacataactagcaggcactccatatttaccaaaatacttcgttataaattcaaatttgttgcaggcaaaaaggaattacagaattttcatttacattcttcagactatatctaaagaataacagtttatttcctaatatttgtttcacatatcacagtgcctaaccctattctgccaaatatatatgtatataattctttctatgtttaacaatttaagtctattttttgcttctaaagttggattacaacagtttcattttgtgtaataatagcatatattttaaacataaagagtaaccctagtttcttttaaatgcttattaaatgtttctcattaagtcttctatttattgttttgggaaaaaaagtctttctgctacttttgttatccacataaaaaaacatatcctctacaaataataattaacaaatgtccagttttattcattacaaatattaacatcatttttcttttatttatcctttatgcatcattttatacattcacacacacaaagaacattaaaaatatatccaattattcaattttggttgaattttcattaaaataagtgttaaaaatatttatttgttttctgttttgagaaggcttttattgttgtactccagagtgttatttctggagacaaagttgcctgtgctttaatagggagattcctgggagaatctaaaccataagcaacaaaattttaagttaataaattcaagacaaagcagaaagtatagatttgctttcagcattcccgaggtgtttagatttttattagtcacctaattaaaatattgttccaataattgttcttttcttctgaaaataagcagaaactcatacttacacaaaaacacttcataattttcttacacctaaggtttatcttcagaatgatatgtgtatatttaaccctgtgcaaattaacactaaaagtctatgtttgcaggcagagaccacatgttcaaagaaaactatataacaaatatttttaaataatttttcaggattttctatggatttctatttcttttttttctgagatcgagtctcactgtcacccaggctggagcacagctgcaggatctcagctcactgcaacctccacctcctgggttcaagttattctcctgcctcagcctccatgtgccaccatgtctggctatattttgtatttttagtagagacgaggtttcaccacattggccaggctggtcttgaactcctgacctcagggaaaccacctgtcttggcctcccaaagtagtgggattacaggcatgagccactgggctgggccatattctatttctgtataatttttattatgaccataaaaataacaatgtagttaataacaatttaattgtacattttaaaataattaaagtatataattacactgtttgtaataaaaagtataaatgttagaggtgatggataccttatttaccctaatgtaattactacacattgtaggcctgaatgaaaatatgccatataaggcataaatatatacacatactatatacccacaaataccaataataaatttcaataagaaaaaagaataaaaatctaacctatggaaacaatattcttaaattcatttgctgtttaaagccactcgcaaagtgattactagagatgttatttcactatgtaccaaatagtatgttgctaccatcttttacctacacccttgagtaaggtgggataggttaaagttagtggaataatgcttcattaaatgcacaatagtcttaacatgttaaaaaaataaaattaagtttgcacataatctaatgatttttaaatatactgcattttattacataaaagtacaattaataatatacttattttaatatacttttaactataattaacaattccaccataatgtagaaaatagtctgaacacctagcttatacattacttaatataggttaactacaatgagcctctccacttatcttttcatcatgcatcttacattttagtgtccttacttttatagaaaaggttataaataatgcccaataaaaaaagaatctctggtatctctgatgcagcaaaaattgctcatatgttttcacatgtgaataggaataaaataacagcataaagtaatttgaaagctgtatgacatcattattcacttttgaaaaactttttttcaagaaaacaagtatacttttaatgtaattacaatgcttccaaaaatctccttttaaagctatatacaaataattttaaacaattttttatttttatatttatcaagtgtggcaaccaaataaaggctttgtcacattttatacttttctacagtttcacactagtataatttttttatgtatagaaacgttggaggtgttgggaacagcactgtcacatctttcaggtttgtagagttcctcttcagcatgaattattgccatgtctcttaagaattgagaacttatggctaggaatggaggctcatgcctgtaatcccagcactttaggaggccaaagtgggtggatcaactgaagtcaggagtttgagacgagcctggcaaatatggcaaaaccccatctctactaaaactacaaaaattagctgggtgtcattgtgggtacctgtaatcccagctacccaggagacgaaggttgcagtgagccaagatcatgccattgcactccagcctgggtcacaatagtgaaactgcatctcaaaaaaagaaaaaaaaaattgagaacttgttataggctttgccaaattcttcacacctgtagggtttctgtccagtatgaattatgtgtaataagtgttgagaacttccttacaaagaggtttgtcagcctggtgcagtggcttgtgcctgtaatcctggcaatttgggaggctgagatgggtggatcacttgaggttggcagctgaagaccagcctaaccaacatggagaaaccccatctgtactaaaaatacaaaattagccaggtgtggtggtgcatgcctgtaatcttagctacacaggaaggctgtggcaggagaatcgcttgaacctgggagatggaggtgaaggtgagccaagattgcgccattgcactccagcctggacaacaagagtgaaactccatctcaaaaataaataaataaataaataaataaatagataaataaataaataaagctttgttacagtattggtttctgtccactatgaattctcttatgtttattgaagtctgaggaccagttaaaagctttgccacattcttcacatttgcaaggtttctctccagtatgaattgtcttatattcacttagagttgaggatgcagtaaaggctttgccacattcttcacatttgtaaggtttctctccagtatgagttctcctatgtttatgggggcttgaggaccatgtaaaggtttttataccatttatagcatttctctccagtatgaattgtcttatgtatagtaaggtgtgaaaaatggttgaaggctttgccacattcttcacatttgtagagtttctctccagtatgaatcttctcatgttcactaagggttgaggataaaataaaggctgtgccacatttatcacacttgtatggtttctctccagcatgaattttcttatgcctagtaaggtgtgaggaatgggtgaaagctttgccatattcttcacatttgtagggtttctctccagtatgaatcttctcatgtttactaagggttgaggatgaaataaaggctttgccacatttatcacacttgtatggtttctctccagtatgagttttgttatgtgaagaaagggttgcaggatgtttaaaagctttgccacattctttacatttgtagggttgctctccagtatgagttatcttatgaatagcaagctgtgagggccagttaaaggctttgccacactcttcacatttgtaggatttctctccagtatggattatcttatgttcagtaagcgtagaggaatacttaaagccattgccacattcttcacatttgtagggtttctctccagtatgagttatcttatgtgtagttaggtgtgaggaccatctgaaggctttgccacattcttcacatttgtagggtttctctccagtatgaatcttctcatgtttactaagggttgaggaaaaaataaaggctttgccacatttatcacacttgcatggtttctctccagtatgagttttcttatgtgaagaaggggttgtgggatggttaaaagctttgctgcattctttacgtttgtagggttgctctccagtatgagttatcttatgaatagcaagctgtgaggaccagttaaaggctttgccacactcctcacatttgtgggatttctctccagtatgaattatcttatgtgtagtaagggtacaggagtacttaaaggctttgccacattcttcacatttttagggtttctctccagtatgagttatcttatctgtagtaaaggttgagtaccagttaaagtctttgccacattcttcacatttgtagggtttctctccagtatgaattttcttatgtgtagtaagggttgaggactggttaaaagatttgccacattctatatgtttcaaaggtttttttacagtacgtcttctgtctgtttgaatttgaaaattgatgaaagactttcacatatttatcacattgaaatattttgcaatgggtagttgtcaagcattggttaagcccattataacctcttttttgcaccttacactcatccacactttcacatcctttttttaactgtaaattgccatgtccacattttttatatcttctcagtatcactttttgaaaagaatcttttatgttctgctctagccaaagttcttgggcaaaatgagaacaaataactgaaagagacaataaaaacacaacacttcaactgctagactcagataaatatattttacaaatctaacctataaaatttcacagactacctaaggaagatgacatggcaaaataccacaagctgtaatttcttcctggacatataaatgtaacaaaaacatactgaccaaaatacaatttgtaaaaaatgtataagtgaattaagtgtgtgaagggtcccaggtgagcacaatgcaaagagccacatagaagataaagaaaagcctgttacttatacccaacacagctcttccatatctccagtataactctgtgcctttaaaagtaaattattggcctggtgtggtggcttgtgtctgtaaacccaacactttgggaggcagatgtgggtgaatcacttgaggtcaggagttcaagaccagcctggccaagatggtgaaaccccatctctactaaaaatacaaaaaattagccaggcttagtcatgggcacctgtaatctcagctactggggaggcggaggcatgagaattgctggaacccagggggtggaggttgcagtaagctgagattgcaccactgtactctggcctgggtacagagtgagaccccaccacaaaaaataaaaattaaaaaaaaaaagttaattgccaaccaggcatgatggctcatgcctgtaattccagcaatttgggtgaacaagatggaggacaaccagaggtgatcagcctgaccaacatggtgaaacctcatctctactaaaatacagaaaattagccaggggtggtaataggtacctgtaatcctagctacctgggaggctaaggcaggataattgcttgaactctggaggcagagattgtactgagccaaggtcatgcctctgcactccagactagttaatagagtgaggctctgtctcacacatacacacaaaaatgtaaattgccaactcctggtttcttttttaaaaaacaagaaaaatattgacacatacatctttatttctggcttctaggggcttttttagacactagttgatatgtcccatgacacaaaatgccaaaaaaaatggtgatatatgttagaatgacactttgagtctgaaggtaaattatagagaagcagagaaactgcagtaacccaaacagggaatgggtgtagtgaatgattacttattattaactaaacaataaacataaaattttaaacaagacacaccttaaaaacatgtttgaggaattctcagaatctagagtcaagacaattgatttcagactatgccaggacagagccatattataaagactgtaacaggtagctttttgttaatgtcctaatctcaatcaaaggttataatgtataccaaatattagagcaacatggccccatcaaaaaaattataaaattttcaaaagcaaccataaaaagtatgtaaagtaatttttaaaattccaaatgaattgaacagcccagtgttggtagctcattcctgtaatcccaacacactgggagatcaaggtgggaaaatcacatgaggtcagaagtttgggaccagcctgagcaacatggtgaaaccctgtttctgctaaaaatacaaaaattagctgcgcatggtggcatgtgcctgtaatcccaggtacttgggaggttgacacaggataattgcttgaatccaggaggggaaagttgcagtgagtggagattgtaccactgcaatgcagactgggcaacagagcaacactgtctcaaaaataaagtaaaaaaggccaggcacagtggttcatgcctgtattcctagcactttaggaggctgaagtgggtagatcatttgaggtcaggagttcaagatcagcctgcccaacatggtgaaaccccatctgaactaaaaatacaaaaaattatctgggcatggtggcaggcacctgtaatcccagctactcgggaggctgaggcaggagaattgcttgaaccaggaggcagaagttgcagtgagccgagattgagccactgcactccagcctcggtgacagaaaaatactctgtatcagaaaaaaaaccagaaacacagacaactattgaagatcagaaaaatgagaacaaaaagaaatactaaagtaaacacacacaaaaaattgtggatataaaaagtacaaaaaataactgaaaaatttattacaagaaaatacgtaaacatgaaaaagctgaaaaaacaaacttagatacacacaaatatatttataacacccaaataagcaaaatttcaaaaatcacatataagaatagaattttgggtgctgaagataaaaatgatgttccgtttataagcatagtctcatgagataaccagtgaatttatttaaaacatttttgcatgtcaaaaggaaactgatattgttaaatttataataataataaaaaagctgtcaaatgggaataataccatcagcaaaattgtactatcagataaaaagaagtccttccaaaataaccaaatcctgagaaagtatattggcactgcatacaccctacatatcaaagatgctgaaaggagtttcttccactgaaaataacataatgtaagaaaacaccacataatcatatgaaaatacataactttctggaaaagatatgcaaattcacaaaaatggtatttcttacttaacattatcataatgatacagaaaacatttttaattattctctaaatttaaaagataaaagtacagaaattattaacatctgttaatggatatacaacataagaaatataattaacaaaatcaataacaaagttgaaggcagatgttatgatgaataattttggtatgtaactgaagttaattttttaccacattaaaatacatttttggatattttagaggttttatggagtcccctggtaccactaagattatatctgtagagctacacaaaagtaaataagagggaactgaaagcctatcaatacaaaaataaaaaaaacacaaaaaaggcagaaagagaaaatgagagacaaagacacaacaatcaaataaaacaattaataaaaataacagtaaatttttctatttcagaaaactatttaaatatatatgttatctttccaatcaagaaacatactttttttttttttttttgagatggagtctcgctctgttacccaggctggagtacggtggtgtgatcggctcactgcaacctctgccttccagtttcaagtgattctcttgcctcagcctcctgagaagctgagattacagttgcctaccagcacacctgactactttttgtatttgttagtagagacacggtttcaccgtgttaaacaggctggactcaaactgctgaccttgtgattcacccacctcagcctcccaaagtgctgagattacaggcatgagccaccacacctggtggagtttacagtgagccaagatcacaccactgctttccatcctgggcaataaagcaagactcagtctcaaaaaaaaaaaaaagacggtacagaaaaactttaaaattcttttataaaatataaaaaactatgtaaatttgcatgaatcaatcaatagatacaccatatgaaataatttttataacaataacaaactagaaaatgtagaggcatagtttttgtgttcaattgaagttgttatgagattaaaacatattgttttaactttaagatgtatgtaatctctggttttcaaaatgattacaaagggaatatttgtagaaagtatggaaaagaagataaaaaataatcaaagcatgccagtacaaaattaaatgaaaattaagaaagtaaaacagcaaatgagaaaaatataactactagaaacacataaaacaataacaatataactggtaataacaacttcatttctttaagtaatcattgtaaatataaattaattaaactgcttaataaaatgaaatgtaattggaggactttcaaaggccaaggtaggctgatcacttgatcccaggagttcaagaccagcctggggaacatggcaaaactctgtctctacagaaaaaaagctacctgggtgtgatggcacttactggtaacccagctacttgagaggctaaaatgagaggatcatctgaggtttggaggttcagtcaccagtgaaccatgcaaatcagcctggttgacagagtgagaccctatctcaaaaataactgaggctgggcacagtggcttatgcctgtaatcccagcactttgggaggctgaggcatgcagatcacctgaggtcaggagtttaagagactggccaacatggtggaatcccatctctactaaaaatacaaaaaattagccaggcgtggtggttggtgcctgtaatctcagctactcaggaggctgaggcagtagaatcacttgaacttgggaagtggaggttgcagtgagttgagatcatgccattgcactccagccttggcaacaagagtgaaactttgtctcaaaataaataaatacatacataaataaatatacctaaagaaaaatccatagaatgcctcagtggtttcttaaaaagcatactgtatgctgcccacaaaagactcatcgtagcattgagtcaaataggctgaaagtaacagaaggaaaaaaatgtgtatttcatgaaaattgtaaccacaattgagtgaggtggtcataattatattagacataacatgctttaagtcaagcactaccattaggtgaagactgatattatattatagtaaagtgagttaatttaccaggaatctataactatattcatctatctatatgtatatgtgtatataacatcagggctccaaaatatataaagcaaatattgacaaaactgaagcaagacatacacagcaacgtaatagttgtagacatcaagaccccatttgcaataatagaaaattcagagaaaaaaatgaaaaacaaaacttagacaatattagactatattattttgcatacagaggaatacttcagagattataatttataaagaaaaaaattatgtggctcacactttggcagactgtaaaagaagtgtgtgccagcatctgcttctggtgagggtctcaaaaaacttacaatcatggtagaaggtaaagagtaactggacatattatatggtatgagacagagcaagtgtgaggtaaagaagccaggttcttttaatgaaccagctctcatctgaattaatagagtgtaaactttttggttaccaagaggatgtaccaagccattcatgagaaattttcccccatgacacaaaaatgtcccagcaggtcccacatccaacattgaggatttatcttgcagcatgagttctggagaacatggacatccaaaccatattatagaccaactaggcttcacagacacacacaaaactctccagtcaaaaccaagataatacataatattcccacttgcatctggtgtattctgttatgacatataccaagttttattaaatttaaaagtactgactaggtgcagtggctctcgcctataatcctaacactttgggagaccaaggtaagaggatccactggggccaaaagtttgagactagcctgggcaaaatagtgagatcctaacattacaaataagcaaacaattagccagacatggtagtgcatgtctgcagttctagctactcagaaaactgaggtgaaaggataacttgagcccaggaggctgaggctacagtgagccaaaattatgcctctgcactccagcctcaatgtccataagatcttgtctcaaaacaacaacaaatcaattaaaaaacactaaaattacacactcttgtgttttctaacaaaaactgaatgaaactaggaattaaaagcacaagccaaacaggcaaattcaaaaatatgtgaatataagacacattcttcaacatattcttgctcaggggtcaaaaaactttatttttcaaagatgttaatacaacctacagttaaaagctacagtaacataaacaatgtgatactgacacaaagataaacagatgaaagaacagaatagagagctccggaatgaacccttctgtatatgatcaaatgatcttccaaaaggttgccatgagtacaaaatagagaaaaatcatctcttcaaaaaatggtgttgaaaactgaatatcaacatcgataaaataaagttggattattttcttgaatgatacaaaaatatattttaaataaaatacttagacacaaaaaactaacaaatctttcagaaaaaatacaggaaaaagacatgacattgtcttggcaccattttcttagatatgacattaaatgcatgagcaacaaatacaagaatagaaaccattaactatagtagatgtcaaaatttctgtacatcaaaagaaaattcgagaatgacaacatatttagaaaatgggtgaatatatttgcaaattacatgtgaaaaaagttaatattaaaaatatatcaacaactctaaaaactaaaccataaagttcaataacttgatttataaatgaacaaacaaaactttcatcaaaaaactacacaaatgggaagaaacatttgacaggatgcacaaaattactcatttgcagagaaatgaaaaaaaaacacaatgacagcgaaatcatctcacacccattagaatggccactatatattttttaaaaaatgccaactctgttgatgatgcaataaaaatgaaacccatgttggttgttggtggaaaacaaagatgtagtcattattttaaaatgttattaatgttcctcatttatatatctatatacaaaatatgtaacacaggccaggtgcagtggcttaagcctgtaatcctagcactttgggaggccaaggtgggcaaatcacctgaggtcaggagtttgagaccagcttggccaacataatgtacgctatcttactaaaaatacagaaaattagctgagcgttttggcgggcacctgtaatccgagttactagagaggctgaagcaggagaatttcttgaacccaaaaggcagaggttgcagtgagctgagatcgcaccactgcacttccgtctaggtgacagagcgagactccatctctacaaaaataaatatataaatacataaatcacaggaatgaatgaatgaatgaatgaataaataaatgcaacagaggaccaggaagacatatttgaaaatccatggccaggcttggtggctcatgcctgtaatcccagcactttgggaggccaaggtgggtagatcgcctgaggtcagaagttcgagactagcctggccaacatggtgaaaccctgtctgtactaaaaatacaaaaatgagccggtgtggtggtgggcatgtgtaatcccagctactcaggaggctgaggcaggagaatcacttgaacctgggaggtggaggttgtagtgagccaagattgtgccactgcaccctgggtgacagagaaagactccgtctcaaaaacaaaacaaaacaaaacaaaacaaaacaaaaaagaaaagaaagaaagaaaagaaaatctatgtttattgcatcagtattcacaaaagcccaaaggctgaagcaacccaaatttctcttgatttataaacatatcaaaaaatataacatatacatacaatggaatatcgttccaccttaaaaagaacaatcttgtcacattttaagatgaacattgagaatattatgtcacttgaattaatccagtaagaacattatgggtactgtatgattccactcatatgagataccttaagtagtcaaaatcataaaaacaaagtggaaggtttgtctgtcaaggacgggagagagggtaaaatgagcagatgttacttaatgggtattgagtttaaattttacaagatgtaaggtttctagaagttttttgcataacaatgtcaatatacttaacatccctgaaatgaacagcttttcttttgagacaaggtctcactctgtcactgaagctaaagtgtagtggcacacctttgactcctcctcaacgtcccaagtagcaggtaccacagctgcacaccaccatgcctagctattactaaatttattttatatagaggggtctccatatgttgcccagactgatctcaaacttttgggctccagggatcctcctgtgttggccttccaaaatcctgggaatacagatgggagccacaaccatgcatggccctgaaatatagacttgaatagatttaagatggtaaattttatgttacgtgttcttaaaacaatttttttaaagaaaaactgaaaaatgtccagaattataaatcattttgaaaattaccttcaaatcacaaaaatgtttctctcacaaaagaaaatatatgttcatcattaaacacatggtgaaaataagactgtgtctatggctactcacttaaacaagaaaattttatggtcagttctgcctatatagaaactcacacagttttctgaggaaacgctctctggtactcactaaaagccacactcatccacatcctgatataaggccgagcgtatgcagacctgactgcaaaaacatgctgtagtgcctgccctactgagcaaagtcctgaaggatatgcagtctgtccaaaaataaaatgggaattacaactacccaagtccctgtatcaagccaactaaaggggaaccctagtgcagacccagcagccttgtgaccaagctacaacccctcttcactacaaattcagagggtgtctcatcaccctaagggcccaacaaaagatcattaccttctaaaataagtttatgaaaacatgaagtgtttgctccatcaaattcagacaccaatacaaaactatattgtgcccattgtcaatatttctattttaatgtagcactggaagcatgtggcagaattagtcaaagaaataaaaaaatccattaaaattaaagaaaaataagtaaaaattggtgtttgtaaatcatacaatcttatatttaaaaaaccataaacagcacattaaaacctgtctaaactgataaatacactcagtaaattagcaaaatataagattaacatacaagtatatgtatggtctcatacatttaaaacaaactgataaaatagagaaagacaaaaaccttatttactatagcattaaataatatacttcttagaaaaaaaataaacaaggaggtaaaaaatctttacaataaaaaaaaaagaaaaaattagagaagatccaaataaatttaaaaattggcatattatccaaagtgatctatagattcaataaactttctatcaaaattgcagtggtatttttttcatagtagtggaaaatacgattctaaaagttacatgaaactaagataactttgatagccaaagcaatcttgaggaaaaagaacaaagcagaaagataccatacttataatttcaaactgtatttcaagactacatagtaataaaaacagaatgtattgtgcagaaaaatgaacaaaaaatgcaatacaaactattactcttatacatttcagatctgatgcaaaaagagaacttaaaaaatagttttagtttctcaaaatcatgcagatatttttgtgtccccaaaacaatggaaaagcagccagattgagcagactcatatgtcataaagaggactttggttctcactgtgaacttgaaagaagctcaacaaaagaattcttagagaatttaaaagcatgatacagaagatgtcccttggtgagaacaaaattaaaaaccaaccagccaaccaaacaaacaaacaaaaaacagctgcccaggaactatttcctttagaacacagcttcccaggtcacattttaaggactggccttctcttggatgttgcgacctctcatttgtgtcatctgttgtattcattttcacttgcacctacctgggggtttggcaatcatctcatgtctcttcacggtcagaggtttttttccttgctccagacaggtgatcagttctggcttggagagaacaatacctgttttattaaaaataaatagcatgaatcttgcttatattgtttaattacaagctagtagtgtgctcagcagagaagatgaaataaaatattctagtaaattaatgccaaaatactaatttataacaaatttctaaatattaagaaataatttcaacttgtaggtttcttttgttttgctcttgttgcccaagctagagtacaatcactcaatctcggctcaccgaaacttcagcctcccaggttcaagcaattctgctgcctcagcctctggagtagctgggattacaggcctgagccaccatgcctggttaattttgtattttcagtagagatggagtttcttcacgttggtcaggctggtctggaactccggacctctggtgatctgcctgcctcagcctcccaaagtgctggcacctggccaccacactgggccctgcttataggttttttaaattttactacttggtactactgaatcaaaaatggcttgtgtcaatgagattttcaggtgggggcaacaatattttatgcaactaaatttctggaattaccactaatttagagtgaagaatagagctcaagtcaggaatgcagaagtttggattaaggtgaaacatcttgcagaaattcttttctacatgaacaaattctgaagattttctggaaaaaggccatctgaaactcttatgcaaagaataaattatttaaaaacattccactaaaaaagaaataaaacttttagggttttttgtgaattatgtatttaagttgtcctcaccaaggaagaccaggtgtctgtagttctctaacatcacatccctatataaattccgctgtgcagtgtccaggcaatgccactcctccagagagaattctatggccacatctgtaaattgcaatggcccctgaaacacacacacacacacacacacacacatttttaccaagtcgccatgggtggaatttttgacttaagatgaaatgagcgagtaaagagaactgattctgacttataggactaaaattatccagtaaaacaattttcaacacagaaatattccctattatattctctgactctgagaagagcagcataagatctacaacattatttcatgtatgatatttttctaaataataaagtataaaattaacagcatgaacatgaacatgtacatttttgagtgctatatttacatcacatggaattatgaatatttttcagatggaaaagacatgttgagttagaaggcacctctcaaaattttttttttttttttgagacggagtctcgctctgtcgcccaggctggagtgcagtggcatgaactcggttcactgcaagctccgcctcctgggttcaagccattctcctgcctcagcctccagagtagctgggactacaggcgcccgccatcatgcctggctaattttttctgtattttttagtagagacggggtttcaccgtgttagccagggtggtctcaatctcctgacctcatgatccacccgcctcggcctcccaaagtgctgggattacaggcgtgagccaccgcgcctggcctcaaattttaatatgtacaataagctgaagaccttatgcaggtttttttttttttccagaagatctggcataaagtctgattttttgaatttctaacaagctcaccaataatgtcaatgtttttgtcccaaaaaggatattttgtcaaacatgcagtaagtggaagagcatgtgtttttcccagttttcctggcctgtaaacaaagagccttcattttccaaagaaaagtatgtagaaaaaaaaaaagctgccagatttaatgtgatggtttatccacatcagctgcataaagataattaataatggggccgggcacagtagctcatccctgtaatcccagcactttgggaagccgaggcaggcagatcatgaggtgaggagatcaagacaatgctggccaacacggtgaaatcttgtctctactaaaaatacaaaaaattagccgggcatggtggggggcgcctgtaatcccagctactcgggaggctgaggcaggagaatggtgtgaacccaggaggcggagcttgcgttagctgagattgcaccactgcactccagcctgggtgacagagcgagactctgtctcaaaaataaaaaaaaaagataattaataatgaagagaaaaataattaactctacagtgaaaacaatctgtcagagagctatttcaccaagtgaattataaaccattaactgcacaaggacaaattttcatgatgcgctaatgcacacagaagaacacaacatcactgttgaaatattcctcccaaggaagtaaataaaatctgaatttaataataaagaaacatgtttatgctaatttcaaagtacagaaaactcctatgttctgtaatgttcagtagtaattttaaggagacttcatttagcacccaagagatcaggtatctcctaataatttttttcagaactttctgagtaataaatgccattccatataaataagtattgtcttaatcctgttctgcataaattaatgaaacacacagatggagcctcaacattacacgttctccatctttactaaggacaaaagttttccccaatagaaatcttgagtagccgcatctttccatgttcaacagccacaaagggaacatttttaatattgcagatcataacttattgctgagaatcctgcatggcatataagaagctatgacacagagaatgcagagaaagctctgggatatagaagaaaaattattttttcagagacccttgactatcgtaagaattttaagtagttaaaccaaacccagggagaaaaaacacaagtagagaagtaaaggtttgtgagtgctacatgcatggcagtccaggaggcagagtgaacacagctcttcatctgagacatgtttacctgaagagaagccttttttttttttttcacctcctcctctggaattccttgtcagatgagattctctggccaaattacccctgcatcttgagactatgcctttaaatgtgtcagcaccacatgtttacctgctagcatgacatcaactggcagaaaaagacagaaaaagtccacccatttctgttttttacaacaaaaagattcaagaacaatgagatgctccatgaagataaaaatataagtttctcctttcatgtcctctggtgccctttctgccacagacaccagcaatttctgctacagtaatggaaatatgtgccacactgacctgcccctaccaaaaccaaacagaacaggtcctgtgcgcaccacttagtgcaaaggtggaacttcttaactctcatgaaagtattttgagaccctcatacctgattctggcctccccttagagtcacgtgaagcccttcattaaaacaacatggatacttccacccagaacaataaacagaaccggtggggaaggcacaagagatttctgcaaattggccatgtgatcctaatgagaagcctgggctgataaccactaagctaagcattgcctctcaagctttaagaagcttataaatcacttggtaattttgactccactttatgtgattctgtaggtttgaaaagggtccataaatgggtgttttaaacaagtcccctgtcaatgctgatgttgcttctccttggctcattattagcattagagaaagcaggaatagcagagggtcccttacacttagaactcttgtcacaaccaaatacttctggtacaaataaggacaacacatctatgctaaagttttatattctttgctgggtctttaaagtttacagaggaaacagaaggcagcaatgtctggataagtctgcatttaaaaaacatgtacacatgtacaaatgcaatgtttattaagcaggtactttgtgctcaagagtatgatacagagcactatgctgggcataacatattatgtgatttaattcttgtaacattcttggagctagtactcagggtttaataatttccaggatttagataaagggcagagaatttttactgcctcttctgtttctctgttaccaaatttttttaaacattgtaaagaataaaagctaaatatatacagatgaaagagatatagaagagtttattgtagtttagagaaaattttattctgtttatgtttacttttctgtgacttgtggagcaactactggatctgcaggaatagaaaacaagttgctaaatagaatgtctctgccaacactggttttaacagaaaatttaaaaactaagactctacaatacatactttatttttcccatttatctgcttttgggtttcaggaaattggattcaccagccaaaactctgatatcttctaatcagttctgtgaggcaagactccagagtagggtcagacctaaataaggcctccaaaaagggtgaatctgaacatgtctgggacaaggtgaggatcctatagaattctgttctctatgccactgtggtactaacagttttctttttttctaatcttacctaaaagaaaaaccccagagtttctgtaattttaatattttctagcactgctctgtcaactttatactgtatactaatatgcaatttaaacaattctcttaaggttttctagggtaattttataagaaaatcagtgtgtacacttacgaaggtaaaagaacagaaattatacggctgggcacagtggcttacacctataataccaacactttgggaggctgaggtagatggatcatgaagtcaggagttcatgaccagcctgactaagatggtgaaacctcttctctactaaaaatacaaaaattagttggctgtggtgggaggcactgtaatcatagctatttgagaggctgaggcaggagaatcgcttagacccaggtgacagaggttgcagtgagccaagatcatgacacagcattccaggctgggtgacagactaagactccatctcaaaaaaagaaaaattaattataacaattctactgttcattaatatcccttcaggtggtaggtaccatgactgcttcatgtatttttttttaatgaccataagaaatggaagcaactagtttatctacttgggtctccagatctccttgtttatcatccaagtaccaggaaactggagaaactctcatccctgtacaaaccaaagacaactcttgtatgatgggttgaacaaacacagaatgactcatttttctttacactgagacagaagcagaattaaccactcttgtcagcctgacacaattctactctggacatcctcaaatgcctcaaagaaacctaggtgattgtgagggaattcccagtgacccagggctgatggcccaatgataagccaggctggagcgactcaggctgattctaaatagaaaataaaactgcgttggtggagccccagaacctgggtcacctgtcctgatatgctagcacttgggtaaaagacagaacaaaaatactctactccagtatcccattttacaggtaaacatagttgtggtcatggctctggatactttgtggcctgatctctcactcctaagatgattatttacacttacagattctgccatcagattctatttcctcctggagcctctcacatcactgtagcaggtcaatgaaaaagatgtaaaaaaactcaaaatgccacactctgaaatgggggctgtaagatgtctatcttgacaacttacaatgcagaaaataacttttgttaattttctgtacattccatatccaaagtctggcactttttaaatcccaggcagaggccggacctaatctgtagattctagataggatcaacctggctctgcatcctttggtgttacagcaaatggagtacaatcaaaggagagtaccctcatagaggctgctctagaacattctaagtgataagtctaaataaaaaaagctgacatatcaagaatataagtagacagtttatttggtttaagcttaaggattataaccagggagcaaagattcaagttgcctgaaatctacactttgattagcagcagttacaagatttgtaaagacaagagagggacatagagtggtctgatacaaagttgtttgtcagaagtttttatttatttagataaataatattgattattgattagatatatatcattattgtttagggtatagaatatagtatccaatgtggcattgttaatttactttatagctacttgtggcaatagtgaacagtttcaagggatgaatacatagttcaaaggggagagaaagatgttaactgctctttcattttaacatctctctgagtttgataaccaaaagtgcttgcactttttagataaaagttttttatttcccaaatctcaagatctggattcaaaatatggagctacagatttaggtcctgaatggcaggagtagcagcaggtgttacttgcacattagtgagcatttcagcaagagtagaaaggggatagtggagactttcttgtctacatgtctactcaattcacatgttactccagttcagtttgttggccccacggtctctgaatctgtttaaggtctgaaaatacaagagtcattgaaagagaaaaaattattgattgcttccctgtgaaatttgtagaaatctgatctagtctctctagcagtgactgtaaaggactctagataccaaataggcagggacacaattctgccttcatatttaggggacagcatgcactttgctgcacaagtgtgagttgactggaagcctgagaggaatagtcccctctagagtaagttccggttggcaccttatttgtgtttatatcatgtctggtaattctagacagtgtttggaaacaataattaaaagacagattttatccagctccagagaaactccacaataatagaacagaaagaaaatggttttattacacaattgaacttgaatgtgacatgcatcatggtcagtctgcttaagagactgcaaagatagaaagatggtcaccaatattagtccccaagcagaagaatttccagcaccatgtcatacatagttcatcctaaattcacctggagattgaagaggccatctgtgtatactaattgcttatattcaatgacaaataaacttttcacatcttcataacaggaggtagtttagcagcttgaagccaggtgcctgctgaaggtagcctcttactctgctacaaaaatggttgaatagggttcttttttgctatttacattttagagctgtggttctgtactccctgccactgggctacagcactcctgcttgctttctcctggttgctagtatgctctcttgacctctaccatgtgccactgaggcacagcccagagcacagctcacattttatgtgaatcccatttgccacagcagcactttagtgtcacatcagatagtgaagcctgagctgcaggaggagagcctgcaggcctcctgggtagaattacacattcacaataatggaaatgagagcagtgtttcaacctcagtttctacttataatggtgacaaggaaaaaatactgctgaattttcagcatgactcaagatagagatagctccaaaagttctcactatgacagcccacctcattcagaaaaaaatgggatattaatagggtttctgaaacagacacctaaagctttggagagacaaacagatctccgtctgagcaagattgagagaaaaaagctaaaactatcttaagaaaaagctcagattagatgtaagattgatgatgtcagccagaaaatattcccctgaaagcaatttctctctaaacacccaaagtgcacagctactctctgcatgagaaacattagcattatgaagaaaggggcaaagtctcagaagaattttatagtttcttttctatctctgctgatccatcatctcctagtcattgaataggggttctgtattgaaatacatctgacaacttcccacaacaccttctgatgaagaaatagaatctgactgtgttcatttattggaatatattagaacttgcaacatagctaactgaagagctactatggtttttggtggccacatcacctgtctttatttgtcatgtaatagcagcataccaatttagtgaaataaaagatattaaaattttgtttactcataattatccctattgaataaagtaataaacatgtcacactaatatctacttactgtgacaatttggtaataaattttctttagatattagatataaatatcagtatgaataattttaataaactagtaataatatatgtagttttaaaaattgcaactatacttcagttaaaacactttatatttcaaaagtataaattacaatattaaaataaccatgtaagtgattcattcaaagtaagtattgcggctttatattcatgttactgtagaaaatactgtttatggctcatgccttgtccacacttcgggaggctgaaatgggtgggtcacctgggtcaaaagttcaagatcaaactggagaacatggtgacacccatctctactataaatacaaaaacttagtcaggaatggtgatgcacacctgtaatcccagctactcaagaggctgaggcagaagaatcgcttgaacccgggaggcagcggttgcagtgagccgagatcatgccattgcaccccagcctcagcaacagagtgagactctgtctcaaaagaaaaaaaaaaagagaatactgttaaatgtatataaatgcaggttgtctacaaacattacgtataactatgctaattattctgaagtaataaatagaaagcaaggtacaactactgactccactgttaagtttatacactagactgttcttgtttttgcagtgcaagtacttcagcctgcaaatattggataatttccttagatcatcaggtttctgtcaaagaaacgtagtatcttttattgtttaccattctgtgttactaaatttaatcctatctttgtgctaagcttttttgtgctctaaaattagcttttacctaaacaaatctgtgtctattttaaaggactaaaaatgaaaaaaataaagttttcagaaccaaaaacaaaccaataaatctgaagtaccagataacgataatctggagtcagaaaaatgacaaaaggggatgggcatggtggctcacgcctgtaatcccagcactttgggaggcagaggtgggcggatcacaaggtcaggaggtcaagaccatcctggctaacatggtgaaaccccgtctttactaaaaatacaaattagccaggtgtggcagcatgcgcctgtagtcccagctacttgggacgctgaggcaagagaagggcatgaacctgggaggcagatgttgcagtgagccgagattgccccactgcattccagcctgggtgacagagcgagactctgtcttaaaaaaaaaaaagaaaatgaaaaagaaaaaatgacaaaagacattatttagctgttaatatgatttacatacatttcaaaaaagcagagaaaattgtctatatataatctaaatcccttaagcaaagagggaatagcaaaatatttttttggaacttattgaagagttttgaactcttggacatctgaaatttgcacactctatgcacttgacagaatgtttatgaaggaaaaaccagaaaagagaaagatgttataaaaaaatccatgagtgcacaagaccaatgcaacagaatagagagcccagaaataatgccaccctcctacaaccatcagatttttgatgaagctgacaagagaaatgtgggaaggattctctatttaataaacagtgctggaataactacctaacattatgtagacgactgaagctagacctcttcattataccgtatacaaaaatcaactcaagataaattaaagacttaagtgtaaaacttaaaattatggcggggcgcggtggctcatgcctgtaatcccagcactttgggaggccgaggcgggtggatcacgaggtcaggagatcgagaccatcctggctaaaatggtgaaaccccgtctgtactaaaaatacaaaaaattagccaggcatggtggcgggcgcctgtagtcccagctactcgggaggctgaggcagaatggtgtgaacccgggaggcggagcttgcagtgagccgagattacaccaccgcactccagcctgggcgacagagcgagactccgtctgaaaaaaaaaaaaaaaacagaaaccaaccaaacaaaaaaacccttaaaattatgagaaaccctccaagataacctaggaaataccattctagacatagaaactggcaaagacttcatgaggaagctaccaaaagcaactgcaacagaggcaaaaattgaaaaatgggacctatttttcaattgtgaagatcttaagagcttcttcacagcagaagagattatcaacagagtagacaacctacagaataaaggaaaatatttgcctctgacaaaggtcgactttccagaatttattaagagcttaaacaagtttacaagaaaaaaacaagcaacctcattaaaaagtagacaggacgggcacagtggctcacgcttgtaatcccagcactttgaggggacaaggagggtggatcacttgagaggagttcaagaccaacctggccaacatggtgaaaccccgtctctactaaaaatatcaaaaattagctgggcgtggcggcaggtgcctgtactcccaactactcaggaggctgaggcaggagaatggctcaaacccaggaggtggaggcagaggttgcagccagctgagatcacgtcattgcaatccagcctgggtgacaagagcaaaactgttgcaaaaaaaaaaaaaaaaaaaaaaaaagtaggcaaaggctgggtgcggaggctcacacctgtaatcccagcacttttaaaggctgaggtgtgctaatcacctgaggtcaggagtttaagatcagcctgataaacatggataaatcccgtctctactaaaaatacaaaattagctaggcatggttgtgtgcacctgtaatcccagctacttgggaggctgaggcaggagtattgcttgaacctgagagtcaaaagctgccgtgagccaagatcgcaccattacactccagcctgggcaataagatcaaaactctatctcaaaagacaaaacaaaatgaaacaaataaataaataaataaaactaatgtagaaacagaaaaccaaatgcatgttattatttaagtaagtgctaaataataagaacacatgaacacaaagaggagaacaagagacactgaggcctagttgagggtggagggtgggagaactaagaggatcagaaaacatacctgtttggtactatgggtaggacctcaatgacaaaataatctgcacaccaaacccccatgacataattttagctgtataaaaaacccacacatgtacaccgaatcacaaataaaacctaaaagaaaaaaatactccaaggtgggggagagtgcaatgtaggtgcatggactgcttttcactatagatagtagcccaggtggggctgtactctgatttatttctgtgtgaatgcaggtagatgaaattacaaacaggtggcccagaccctaggctggtggagaaaacaggttgctgctgcaaatttagtatctaggggtggggatatgccaggagacttgtagagatttttgggttcttggcaagaaacactaggatcaaaaatgccatggtgaagttcttgagggtggtgccgagtcctgggagaagtgtggatacctcaatttctagtgtgtgtgtttgtgagtgggtgggaatcctgtagtagcagctgcaagaaaaggggtctgtcataagagcttcttctgagttttcagtcctctgtcaccctgggagaagacctggaatcacaggacaatgggcaatgtgacagcctgtgtacaggagagcagagcctcccatttctaaacacccagagctttgttccagtccaggcctctgtgatatcttttttctggcaccaaatctgtagagtttgctgagcatcaaacaattctccaacaactaattgtctaacatttaaattctgacaccacccagagtcagcacagaccctgattcagggctcagttccacaacattgtcctcactgcagatgccagtcacaaaccccatgggcccatctacgcttctgagctactgtttgaaaactggggactcccaaaacctccctgaagttcaatgatttggtagagctactcacagaactcatcaaaacactgtagttatgtttaccggtttaatatataagatgcagcccaggaaaagccaaatggaagaaatgcatagaacaaagaaaagagatggggaaagatgaaacacatagataatcatgaaaaatgtttgtgattaataaaattctccagccgggcacggtggctcacacctgtaatctcagcactttgggaggccgaggagggtggatcacgagatcagagatcgagaccatcctggctaacagggtgaaaccccatccctactaaaaatacaaaaaattagccgggagtggtggcaggcgcctgtagtcccagctactcaggaggctgaggcaggagaatggcatgaacccgggaggcagagcttgcagtgactggagattgcaccactgcactccagcccgggtgagagatcgagactccgtctaaataaataaataaataaaaaataaattgtccatcctttgtgtactccaggaacagtttatggaaacacccttcaccttatgacttcaatggtgctcttttttcttacctatcacacaggcaaacacactctctgcacattttctcctatttctcattataaaaatcagctgattttttcttcagtggtcaattttttttttttttggtgtgatcgagtcttgctctgctgcccaggctggagtgcagtggcgccatctccattcagtgaaaccttcgcctcccaggttcaagaaattctcctgcctcagccttcccagtatctggcactacaggcgcccgccacaacgctcagctaatttttgtatttttagtagacacagggtttcaccatgttgggaaggctggtcttgaactcctgacctcaggtaatccgcctgccccggcctcccaaactgctgggattacaagcgtgagtcaccacccctggcctaaaataaagtaattcttaatgaaatttacttaagtttatctccctccgtcaggctcctgaactttgagctaccctcggtctgagtcgacatacaaccccatttacgtccctcctaagaacatgctgatttcagggtaagacattctgtgatctaaaatctgaccttttcaccctccatttgccattcccttcccacctcctttctaatcttgtttaatcctccttaggaaagaaagtccttttgtgcctacagttttgcaagccacaaagaccttatagtaagttgatactttctcctattgcaatacttttttggaattcattgttttacataaatctaacgttgttatcttacaaagtctaaaacttgcctcaaaacaaaaacttcattatcagtaagaccctcccagtttcctttcatcttaatcttaactgcatctgcctgtggggctccagctttccagggctctgtagcttctctcaggataaaggctctttccatagctggggtgagcaggctgggacatctgcagggaagtctccccagcaaaaaaagaactgggcctttaataacctcctgttggccgagtgcgctggctaaagcctgtaatcccagcaatttgcgatgccgaggcgggcgaaaaacctgaggttgggagttggagtccagcctgaaaaacatggagaaacctcctctctactaccacacaaaattagccgggtgtgatggcgcaggcctgtaatcccagttactcgagagcctgtggtaggagaatcccttgaacccgaggtagaggttgcggcgagccgagatcgagccattgcactgcaccctgggcaacaagagctaaactccatctcaaaatttaaaaaaaacaaaaaacaaaataaaaacacctcctttttgcagccttaatattagccttagcttggaattactaggttcaagcttcagtttccatgtcagtgttattcacctggtttttgaaactaagtgtttgaaaaatccagtgaaattactcaaacatagtgtttacataaacggagattttaagatactttttaaaattttattaaacaggagtctcgctctctcatgcaggctaatgtgcaatgacgcgatctcagcttactgcaacttccgcctcccggtttacataaaggaaggaaattttaagatccttacttttttttttttgcgatggagtctcgctctgtcgcgcatattggaatgcgacggcgcgatctcggctcacggcaacctccggctcccgggttcaagcaattctcgtgcctcagcctcccaaggagctgggattacaggcatttgccaccacgcctaattttcgtatttttagtagagacggtgtttcgccatgttagccaggctggtctagaactcctgaccacgtgattcgcccgccttgctctttgaaagtgttgggattacgggcgtgagccaccgcgcccgaccaggaagtggttttttaaccctaaggcagttttgtttttgtgttcttcccctattgcctggggtcagaccagatcatctaaactgatcccgactggcttagaccccaactttttccaaataggataaacggagatttgcagggaaagaagagggaagaaggcgtagtattgatttacaatttttacaatttatgacctggaagttgagtctttcaagaggaacttagttgtcctaacaaccctttacctcaagggatccgcccgcctcagcctcccaaaatgtgggattacaggcgtaagccaccgcgcctggccccataaatttttaatacgagaaaagagaaactgtgaaccccacggaccaaagctcttcccattcgggaacccgcaccccgagtcaagattctcccctaaagaccctctcgtggttcctgcacaatctgggagatacccggagctgtgggtgcagagctgcccagagagggctccaggccggggcacactcgctgccaagggaagagtcaggacgcccgggaccggcttatagagcacccgccatcttttttttttttttgagacggagtctcgctctgtctcccaggctggagtgcagtggcgcgatctcggctcactgcaagctccgcctcccgggatcacgcaattctgcctcagcctccctagtagctgggactacaggcgcccgccatcatgcctagctaatttttttgcatttttagtagagacggggtttcaccgtgttagccaggatggtctcgatctcctgacctcgtgatccgcccgcctcggcctcccaacgttctgggactacaggcatgagccaccgcgcccggcggagcagcttccatcttatggatggtggggactaacgccaagctgggcaaggagaactcagggcacagattgtggagctgactgcggggagccctgagtcccgccactgccacttcccatcaaccagtccctcccctctctggggatgttggaccggtactcttaccatttctagacttctagggggtcctggctcttggctgtggatctcccaatacctgcaggtcaaagggcctcagaggctgggcctctatgagcagagaacacagagcagtgaacaagagatctggagctccagcggcagcaagagacaaaggccgcgccataccagaaagccgtcctcttcgctccagctgcctgcctgattggagggtttccagaccagcctccctgattggattatgcttaaggctctgccccctcagtacctgagtgacagaagatgtaatcagattctgggctgagtgaaggagtaacagcctaagatgcagcctttccagacagggcttcctccctgagctgagccaggctcaccccagagaagggaacaattctgtatcttttttactctctctgtttttgaatgtattcaaaaggtgagcaggagtatttttctgtcatatgaataatacataatatttttgttcaagagaaaatcaacttttactttggtaatagtgtattatcaatactaaagctaattttaataaaaccttataaataaatcaaatttgccacttttaacctctcgagatttacacatatattttgtaatctcttgtaatttttttaactttttatattttatttttatctacattctattttttcaatttgaaacaacctttaagtaatttcaaattgttgtaggagatagaaagaaatcatttaaggccaggcacagtggctcatgcctgtaatcccagcactttgggaggccaaggtgggcagatcactttaggtcaggagttcaagaccagcctggccaacatggtgaaacctaatttctactaaaaatacaaaaaattagctgggcatgctggtgcacacctgtagttgtagctattccggaggctgaggcaggagaatcacttgaatccaggaggcggaggttgtgtaatggcccaaggggtacaccttgccctttggtttagacagagctgatttatcaagacgggccttttgcctagacagagcctattaattaagacaggagaatttgtggaggaaaagttaaatattaaatttgaactcaattgaatgtggacacagacaatggtcactaagtcccagaataggttgtgtgagccccttgaggcatttatccagtgctgtattggagaaatctgtaattcaatctattcccatacatttattattgaaaaacaataggcaatcacaaaaacaaattggcctttttgtgttccttgggcctagtcttgaaaggctgtcataactgggccttatgccaaacaacttgctacaaaaagagctagggtcccagtgtagcaggacaagccacagacaaaacctctcagacatcgagttgtagaaggaagggctttattcagctaggagcatcagcaagctgctgttttaaaatccaagctctctgaatgcacaatttctgtcctttttaaaggctcacaacactaaagatttcacatgaaagggtcgtgattgatttgagcaatcaagggttacatgacaggggctgcatgcaccggtggtcagagagaaacagaacagggcagggagtttcacaatgttcttctatacaatgtctggaatctacgaataaaatcagtttttaagttatgagttgattttttattattaggtttaggccaggcaggcccagggctgcctgtctttaacttcacttccttgtttttttcttaaaacaggtactgagtataaaacaataaaacaatatgagtgggtctctctcttccctcatttcctctctttgagactctcacttttttattagtgggagttctcactcttatttttgctacttatgtctttttgtgcaatagattgatagtgatttatacagtatgcttgtgctgaagtattttggtgaactaaggtagcgacgaagttttttatcatttggagaaatacaggtatcagacaagggagcagtaagcaggttcctgttactattattactcttattataagagttttaaatcttcctatttctggaattaatttctaaacatggctcttggattgagtctgtgccacacttgcacgggtacatgtgctagttttgttatatctttaactatatcttcaactacttgcccctgatcatctgtgtgtagacaacaattagtaaggttaaattttctacaaacttctccttcagctgctagcaagtagtcaagagctagtctattttgatagacagcatttctcatcagagtccctcatggggcaagaacagtcaaggcttgaccagttttattagtaataatttttaaaaacagcttgtaaccctatgatttggttgagcctgtagatgggggctcgatatccttatgagccatcttgtgcctaagtggcaggtctatagtattgtatgattttttcagggggccattcattatctttctaatcacctatggctatgcttcatttttcatgggaagcatagactgggaagcctagaaattcacctgtttttatggacagcaagaagaaatggacagcttaatggtgccaattacacagctacctgtctactgatcaggtagcttagcataagctctgtgtctatagatccagtataacctggtgggggctgtccagtcccgtggaattctgggtggacttaacaggctgcaactttggaaatttactgaatggatttctttctgtgtaattggaacttcaccatgtaactgtttttgtggtattattacacagcttttgtcctaggcaactaagtcaacttacagaatgagtgaattttgttctttttctggatatgcaatattgtccaataattgagacttttagaacctagaaatgatcagggtgattcttttgggccaggaattcatcaggaactgggtccgtaggcactaattcttgggcttcttatggccattgatcttttattacagtttatttacaaacataacatgaagtgatatttagagattgggctacatgctcggctaattgcaaaaacaaatttttagtttttcctggaatctcaggtactggcacatttagttcatcatagaaagtctgaaatactggttctgaagagtgtttttgaacctccttttattagcatgcttatactaggatctagtccttttccatcaatgcctaatgttacattatattttttgttctactttgggtctgaggggtttgtgattatcgattttaaaaggttgcagctcctacttgtgcaggaggggctgacttttcctttttggagctaaacaggatcttttttatctttttttcaagtagcctaaatgacacaagactagtattgacacatcttagataaatatgattcttgacagatatatacatttttttttactgtgtaacttttttttctaatttagagaactgcatcttattccatgctgcttactatcaatagcgcacaagcaccaaattttaaggttacatttttggggacccctctttcttctgttctagctattactttacttgtgtcacttagaaaaggaccagtcctaaattttattttaaaaatgctgatcatgggaagcttaaaatgggtcataacatgcatcaggttatttcttgggctacataccttggatagaatagcattatacaaacaagtttcttttagagtcctggtacacctacaataactataaaataataggactgtagcaatcttttgtcttacttcagtgacttgatgtatatactggaaacagttctcagtctgaggaaggtcagttgaagtctttactgtacaagtccaaattttaaggaaaatgagtgctgcaatgagtttcttcatgctttggctatgtgtggaccagtcagcttctgggtgtgactggagcagggtttgtggtcttcttcagagtcactttgcaggggttggcgaagctgctcctatctatgtacagctcctagtctactgatttttaagggtagtctcggaggttgggcccactagaataaaatgagcctaatacttctacacagtttatgtttaactgggctctctgatactaggagtaaggtggcggggttagggtgttgcaatcttcaatggttgtgtggggattttcacagagcaagctttggtatctagttagtctagcattcattagctaatggtgtcctttggtatttattaaaatcaccacagcatggggggactttatgtttaggttttgtctaagagttagcttatctgcttcttgtggtaacagggccattgctactagggcctttggacatgggggctagcctttggaaacccaaactagttgttttgagagattggccactggccttggccagggcctcacagtctgagttaaaactctaactgccattttttttttctttctgacacatagagtgtaaacagttttgtcaggtcaggtagcctcagggctgtggctgacaagagttttttttttttaacttgtgaaaagctcattgctgttggttgtaatagatgtagtttatctaatctacatttttattgactgtcatctcctaaaatattgacttaaatcctgtaactatttgatttcaggctttaaattgatctggtattccttgcggggctctaattgcatctaaatagatgtgagagttgaaagacctataagggcttctcctgctttatgatgtcctattatttatttatttatttatttatttcctctggttgatgaaatgccagtgtgaaagggatagccaaatggactaaaacacaaatgccactctagttattcggcagagtgcccagtaaaggtctaccacaataccaccacacatccgctcaaggatgaagaagggctgactgattgataagctcttgaaaattcttaagctcactgtatcctttcaggtctctaaggaatgctaagtcttagtgttcctaagtgttaggaagtgaacttagtgttgggagatggaagctggatggccttcggggactgacctgcagggacttcagaatatagcagagagaacttggcatgacttattactctagactgtagaatcctggaaaagagctatcatgcagcctatgcctggtcaactggaggaccacattagtggaagggggacaatcagggcctctggcctgccatgtgcacaagcataacaattgcttttgtttaaggtgcagatggaatatgtgatctattttaaccaggaatttgcatcttggtatgctgtcttaattgccaaagtttgttttaactctttaacttttatgatcctctagtaaaatgaacgtctcctttagcaccaatttttattagtttttagactaaagaaagctaaacaccactttatatttaataatgtttcttgtatgatttttataccagataagctaaattttacctttatattagtgtgttattaatattaatcttaattttaacataaccttgtagacatatttatcaaatttttcatgtttgaccataagttaagattttatagactatttttaaccttttataatttttgttaaagagcaggtgatgctttaagaaaaacctgttgcatttttactttaatgtccagttcacagaaaaactggatgatactgttttaactttagctaatgtgttcacacacagaattttctttataattaacattttaaaacttgcttaaacttttaaaacaataatttttttaaccttttaatgttggtaaaaatctacattcttatgcccttttataatctttttactaaaggtatattttacttttcttatacactttgcacataaacttttttttaaatagtacttaggaggctttattacttttaaattatataacatttttgaataaatttttttataacactttttctttcacaactttcaccaacaattcttcaacatgtctcaactttttgacttattacaaacatttattttttctttaaacaactagttaatttatttcaggacaagaatttaccatataacactctttttacataaattctacctcccccccccctttttttttttttgaagataacaattcctttttttaaagcgaactttctttatgtctttggactagactgtctaaggccacaagattagaagttaccataatacacgttacactgttaacttttagcaaacttcacttttgttgaaaactttgtaagtttgggatttcatttaccctttgctattaataagaccttgtttagtttaaattaacttggaattggtataggtggcctttttttctctctgccggtctttccttgcctctgccagccgcttatgctgctgttctcttaattactgtaggggggaagagggtctaaaaccagctgtaactgtctatgtatggaaactggtctgggtgccttggcttgcagattacattgtgtcatacttttgaaacaagggacctgtccaggcttccttctgatggtcaacccacctctaatgctggccagtctatttcacacaaagttctaagttttcttggtgtcatagtaacactgtaatctctattaaatcttttcttgaaatttttttaacatagttcctaatggggtgggcttacttatgcctgacctatgcttctttgagacaaaacactatgcttacaccacacacacaccacaaaacaaaacaaaaaaaaaaacaggtaaaaagggcacacacacacttttgcagtttacaccaaactaaaatcaaaaccaaaatcagagtatccagaaatctaagccaggtcaaaaccaaaactaaagtatcatgcagtctaagtcaggtcaaaaccagaacaaaagtgccaatgcaggcacactgtgggtgatcaggccactcttccattcagatggggtggggcaagttccaaagactaatcttaccaagtcaagccaagtcaaaaccagaacaaaagtgccaatacaggcacactgtgggtaatcaggccacacttccactcagatggagtggggcaagttccaaagactagtcttaccaagttacagatgtccagactccaaatgccagttccttctgggtgttcagccactgtgttaatcctctgtggggacctgctactcgctgctctggtgaggtgttccgccagggcaatttcctacctgggagcactctttggatcatgtaactcaggctggctggagtcccccgcagagatgctccacagggcaggcttaagccacctgaggggctgcctcagctgcccatcagttacctcatttcccagtcagagaaccaagaaatgtagcaggacaatccgcagaaaaaaacctctcagacactgagttgtagaaggaagggctttattcagctgggagcatcagcaagctactgctttaaaatccgagctctccaaatgcacgatttctgtcctttttaaaggctcacaacgctaaagatttcacatgaaagggtcagattgatttgaacaagcaaggggtatgtgacaggggctgcatgcaccagtggtcagggaggaacagaacagggcggggagtttcacagtgttcttctatacaatgtctggaatctatgaataacattgatttttaagttatgagttgatttttaactactaggtttaggccaggcaggcccagggctggttttgggcctggcgccaggctgcctgtctttgatttcacttccttgtttttttcttaaaacaggtactgagtataaaacaataaaacaatatgagagggtctctctcttccctcaccagagggggccaaagttttatgagacatctcctcatctgtgcacagatgggtggcggactctggagtccaggctgttgcttcccattctagtggtgaatcttccatagtctggtgagtgtaaatatatatacatctctttttccttctcctattcccattgcaatttgcttttatcaatctgcttattacattgatttgcttattatatctgaattgccatttatgtgggataaagtttgtttacccttaaaggtattgtgtgtgtgtcttttcttctccccttctgtgtttcccacacagaacatttttgtcattacaaacagaaatcaaaaacaaaagtgtgctgcttcttggccagaaggacagggctgatggctacgggacttcccataacctgggatgagaactcccgcagttctccccctttgtgatcgaatggtccaggggaactgacctttgtgagaactgggaatcttaattagtgcaatttaaacctttgcctgtgcatgaagtgctgcaggagattccagtcagcaaaggagctgctgagttgatctcccggagtggatggtgtttgcttactgcttataagttaatgtatcaagacaggggatggttgctacaagagaaatgtaagctggaaaagaaaaatgctagtctgacttccagactggccctggcccaatgccaggcctatgtcttgactgatcaggctcaaagatatccacctattgatgaaaaaagcagctgtccaaatggccccatcatggtaaaactgaagaactagttagctaggcttggagcaggtaaaaacccagctactggccaggcacagtggctcatgcctgtaatcctagcacttttggaggctgaggtgggtggatcatgaggtcaggagattgagacaatcctggcaaacacggtgaaacccagtctctactaaaaaatacaaaaaattagccaggcgtggtggtggctgcctgtagtcccagcaacttgggaggctgagacaggagaatggcgtgaaccagggaggcagagcttgcagtgagcagagattgcaccactgcactccagcctgggtgacagagtgagactccgtctcaaaacaaacaaacaaacaaacaaaataagcaaaacccagctcctgtctcaaggatgggaaattaaccttagtaaaattcaaggacctgcacaaagtgtacaattccttgacatcttatggaatgcagagaaatagcccattttaccaaaggctaaggctaaaataccagaatttgcaacccctagcaccaaaaaggaggaccagaaatttattggtttgtttggattctggaaacatgatattccccacttgggtaacattttacaacctctgcatgtagtcactaaaaaacactatgactttcactggggagagaaagagagcatggcttttaacaagctaaacaagtggtgcaactggccctggatctgtggcccatatgggatgggccagtagaactgcaagtaactgtcccagatcaacctgctaatttgagccttaggcagaaacctttcgggtttgggacccagaaactgccagaggctggcaaagcttatacccctttgtagaagaaattgttagcttgtgattgggctttgctgaaaagagaacaccactgcttcaaccttgatgtctttatgaggcctgaaattcctatcatggcttggtgtcatgaattccccaaaacccaccagataggacatgcccaaggaagtagcatcataaaatggaaatggtacatacaagaccaggctaagccaaaaccaaaggggttatcacttttacatgaggatgtacgaaacttgtccgctcaaaaaaccaccaaactatcctgcagataggaaagaaaccccccccacaatccacccaaaggggccaatcttttaaataactaagcccaaatgatcagaaacatgcttaatttatggatggatccacaaaatacattggtgggacccaatgctggaaggctgtggcttctgttaatcctgttaaaacataagcattactggccagatgcagtggctcatgcctgtaatcccagcactttggtaggctgagttgggcagatcacgaagtcaggggttcgaggccagcctggtcaacatggtgaaaccccatttctactaaaaattacagaaattagccagggtggtggtgtgcacctgtaatcccagctactcgggggagtgaggcaggaaaatcactggaatcccaggaatcagaggttgcaatgaaccaaaatcacaccactgtactccagcctgtgcaacagactgagactcaatctcaaaaagaaaaaaaaaataacaaacaaacaaaaacataagcattcctgatgaaggaagtggtgggagcagccagttagctgaactagtatccatattctaagctcttcaggaagaggccagagagatctgtcacttgtataccgactcttggtcagtagcaaatggtcttactacctctatgctccaatgacaacaaaacaaatggctaattgggaataaaggggcttggggaaaacaatactggaaagatatctcaatcctggcacagactaccattatcactgttttccttttttttttttttttttctttaacgcagagtctagctctgtcaccaggctggagggcagtggcacaatctaggctcactgtcacctccgcctcccagttcaagccattctcctgcctcagcctcccaagtagctgggattacaggcacacgttgccacccccagctaatttttgtagttttagtagagacaggttttcaccatgttggccaggatgatcttgacctcctgacatcgtgatctgcccacctcagcctcccaaagtgctgggattacaggcatgagccatcgttcctggccctttttccatgttgatgctcatgggtctctgctttcttttgacagaccatttaattagcaggaagatcaacaggccaaaatttccaccataactgtaaacttgaatgtgcatgaatggaatacaatgtgttcaagccttgcaatgagaggcattataatgtatggtgctataattggtagtgattaccggggagagttaaaggacattttatacaataccactccagatttttttgctataagaccgcagatgcctgttgctcaattattagtggtaccttgtcaacaattatcccgtgaggaaatctctgccccaacagaggctacatacagaattgggggattcagatccactcctacaggtagcttaaatcctggagccaatatatggatacagggttcaacagatcctgcccctaaggctggtgaccttgtagctatgaaagcagaaaatgaaggcatagtacaatttcctaaagatgaaaaacaatatgttcccctctgtttttgttattacaaggaataacctatctactaatggtcagcacctgtgtctttgtgtctaaagccaagaataaattcatttactaggtagccactgctgcaacaaaagccaatcacagagaatgttggctgtacatcgagttgccagaggctgccaggaatgggctaccttgaagaatcgtccctgacaatatttctgaatggctatgtcgttatcaatggggccacaacaacaacacttgtaatccaacctggacttcctttcaccacactaagcaatctgtctttgcccaggtcagacaaaaggtgaactccaccctcaccttccatcaaaagccttggtattttgcccaatattcctggaacggtatatattggaaacctgctgtgctggtggctggattccacacagcccctgcttcatctggaggccttaaatggctcctctaatgttactctggggtttctccagacaattgtcaacacatactccaaatcaacaacattgcccccaatgaaccacaatctctttcctattttaataacacattagtacagtatgtttacagtaggtccatggctgtcccctggggggccctctgggtatgcagatcctgtgggtgttggtacctgcccccacactgggcagggagatcacttgtgggtggccattaattccattcaccatccgggataatatccccctcccaagtaatctggatgcttacaaacaccactggttatgaatgtgccggcctccttggtggcgataccttatcacagtattctcccctgccgctagaacaatcctgcttcaccaacaaattaaaatattaagcttatatgtagaaaaagctcttaatgatagtagcactggacttatgctgttatcagatgaatttgctcagctgcgtactgttgtgttgcaaaatcaaatggcattagatatgcttaccgcagcccaaggaggggtttgcgccttactgcatactggatgttgtgtgtatatccctggcaattctcacaatattagtctccttgcaaagccatgagtatgtttttttttttaaattgtgcttttaattctcctatgcttaccctgtatccataatctatgtcaactatgagttccccatgtatctataacggtattttaatacaattgagtaccgaattgaggccgaatgttgacgaaaagttaagtattaaatttgaactcaattgaacgtggacacaaataaaggtcaccaagtcttggcacaggttgtgtgagcccctttgaggcgttcattcagcactgtttcagagaagtctctatttcaatctattcctatatgttagttattgtaaaacaatagccaatcacaataacaagttgacctttttgtgtttcttgagcccagtcacaaagggccctcgtgactgggcttcatgccaaacaacttgttacaagaagagctagggtcccagaccacactaaagcttcaagaaacctctcctagtctgtgcaaggactgttggctgactctggagcccagactgttgcttcctggtctggtgataaatcctccatagtctggtgagtgtaaatatatatatatatacacacatatatatatatattcccttctccccttcccattgcaattttcttattatataaatttacttactatatctgcattgccatttacgtgggataaatcttgtttatctttaaaggtattttgtgtgtatgtcttttcttctccactcactcatttcctgcaaagaacaccatatttctcagagcctttgttggttcctttttattattttttctttaatcgtgtctgcatgccttattttagcaaagtggtcttcaaactctgatatccttcttctgcttggtcagtttggctattgatacttttgtatgcttcatgaagttctcgtgctgtgtttttcagctccatcaggtcatttatattcctctccaaactggttattttagttagcagttcctctaaccttttatcaaggttcttagcttcattgaattgggttagaacatgtttctttagctcagcagagtttgttgttaaccgtcatctgaaacctacttctgtcaattcatgcatctcattctctgttcagttctgtacccttgctcaagagacattttgatcatttggaaaagaggcactctggcctttcagccattttttgttgattctttctcatcttgagtttgtctagtttcaatcatttgagggtgctgacccttggatggtttttttttttttttggacacagtctctgtcacccatgctggactgcagtggcaccatatcagttcactgcaaattctgcctccaaggttcaagtgattctcatgtctcagactactgagtagctgggaatacaggcatgcacaaggatgcctggctaatttttgtattttttagtagagaggaggttttaccatgttggccaaagtattgggattacaggtgtaagccactatgtgcagccttggatgaggtttttgtgggtacttttttttcttgttgatgctgttgttgttgctttctgtttgtttttctttcaatggtcaggtccatcttctgtagggttgctgcagtttgctagggttcacttcaagccctatccatctggttcactcccgtgcctagagatgttactcaaggaggttggagaacagcaaagaagaatgtctgttccttcctctgtcatctctgacctcaagagacacaaatctgataccagtagaattgctcctgtatagggtgtctgacaattcctattgaaggtggaatggggagcagatggggagcagaacccatttaatgaagcactttgactgtcctttggtggagggaggtgttttgctgtgggaaaatccactcatctgggctgcttaaatccctcaaaactagcaggaggaaaggctaagtctgctggtccacagagactgcagccacccctcctgctagggttctgctctgatccttgttatttctttttttctgctgggtttgggtttggcttgttcttgttgctctagttctttgaggtgttatcttagattgtctacttatgctctttcagactttttagtaggcacttgatgctatgaacttcccttttaacaccactattgctgtatcccagatgttttgttagattgtgtcattattattgttcagctcaaagatttttaaaatttccatcttgatttcatacaacaatcattcaaaaacaggttgattgtaaattttatgttttatttaatttccatgtatttatttaatttccatgtatttgcatggtttgagggttcatttggagttgattttcacttttatcccactgtagtctgagagagtagttgatataattttgattgttttaaatttattgagacttgttttgtggcccatcatatgtctgtcttagagaatgtttcatgtgctgatgaataaaatgtatattctacagttgttggttagaatattctgtaaatatttgtcaagactgtttgttctagattatagtttaagtcctttttttgttgttgttgtcattgactttgtcttgatgacttgtctagtgctgtcagtagagtattgaagttcctcatcattattgtgttgccatttatcccatttcttaggtctagtagtaattttttaataaattgggagctccagtgttaggggcatatatatttagaattgtgatattttcttgttggactagtccttttatcattatgtaatgtcccactttgtctttttctttttttaagtgtttttgctttaaagtctttttgtctgatgtaagaatggctactgttgcttgcatttggggtacatttgcatggactatcttttcccaaccctttaccttaacttcatgtgtgtctttgtgtgttgggtgagtctctggaagacagcagatttttggttattaaattcttatccattctgctattctgtatcttttaagtggagcattaaggccactaatcactatcaattatatcaccatacattataatgtctgtcattgcaaggcttggaacacatagtaatccattcatccacattcaagtttgcagttataataaaaattttggcctgttgatcttcctggtgattaaatagtctgtcaaaagaaagcagagacacataaacatcaacatggaaaacagtgataatggtagtgtgcaagaggattcagatatcttcccagtattgtttaccccaaacctctttattcccaattaaccatttgtttcattaccattggagcatccaggtagtaagaccatttactactgaccaagtgttggcatacaagtgacaaatgtttctgacttcctcctgaatagctcaaaagacagctaactgggagctaactggctgctcccacccctttcttcatcagaaatgcttatgtttttaacaggattataggtcatggccttccaccatcaggtcccaccaatgtatttggtggatgcatcagtaaaccaagcatgcctgtgatcctctggacttagttctttaaaggagttgccccattgtacaagggaggtttccttgcctatctgcatgactttgttggtggtttactgagctgtcaagttttttacaccctcatgtaaaagtgataacccctttggttttggcttagactgatcttgtatgtaccatttccattttatgatgctactttcttgggcgtgccctatctgatgagattgtgtggaactcatgacccaagtcatagtaggaatttcaggtctcataaagacatcatggttgaagcagaggtgttctgtttccagcaaagcccaatagcaagctaagaatttcttcttgaaaggagtataaggttttccagcctctggcagtttctgagtccaaaacccaaaaggtagcctcttcccatcttgtttctgcctaaggctccaattagcatgttgatttaggatagttacttgcagttctactggcatatcccataagggctatggatccagggccagttgacttgcttgtttagcttgttcagaagccatgctctctttctctctccagtgaaagtcatcgtgttttctagtgactgcatgcagaggttgtaaaatgttactcaagtggagaatatcatgtctccagaatccaaacaagccaatacatttctgggcctccttttcagtggtaggggttgcaaattctagtatttcatcttagcctttggtaaaatggatgatttccctgcattccataggatgtaaaggaattttacactagatgcctgtccttgaattttactaaggttaatttcccatccttgagataggagctgggtttttacccactctaaaccccggctgcctagttcttcaattttatcctgatggggccactgggacagctgcttttttcatcaataggcagatatttctgagccttatcagtcaagacacaggcctgacatggggccagggccagtctggaagtcagattagaattttccttttccatcttacgtttctcttgtagcaaccatcccctatcttgatacattaacttataagcagtaagcaaacaccatccactctgggagatcccatcaccatctcctttgctgactggaatcccctgcagcacttcatgcacagtcaaattttaaattgcgctaatttagattcccaattctcacaaaggccagttcccctggaccattcaatcgccaaagaggaaaactgggggagttcccatccctggatatgggaattcctcgagtttccatccctgtccttctggccaaaaagcggcacaattttgttttcgaattctgtttatgatgccaaaaatgttctgtgtgggaaacgtgaaaggggagaagaaaagacacacacacaataccgttaagggtcaacaagttttatcccatgtaaatgggaatgcagatataataagcaaatgatataataagcaaatcaatgtaataagcagatttatataataagcaaattgcaatgggaagaggagaagggaaaagatatatgtatgtgtgtgtatatatatatatattgcccaccagactatggaggattcaccagcagactgggaagcaacagtctgggcttcagagtaagccactagtctgtgcacagatgaggacaggtctcatgaagcttcggcacagtctgggaccctagatcttttgtaactagttgtttggcctaaggttcagtcatgagggctgttcgtgaatgggctcaagtaacataaaaaagtcaacttgtttttacaattgtctattgtttttgaacaactaatatataggaatagatttaaatagagatttctccaaaagagcactggattaaagcctcaaggggctcacacaacctgttctaggacttgttgatcattgattgtgtccacgttcaaatgagttcaaatttaatatttaacttttcctccacaaattcctctgtcttgataaattggctgtgtctaggccatgggcaaggtgaaccccttggacagttacacaactctgccctctgggttcaagcgattctcctgcctcagccttctgagtagctgggactacaggtatgcaccacaacatccagctaattttttgtatttttagtagaaatggggtttcaccatgttggccaggctggtcttgaactcctgaccacaagtgatctgcccaccttggcctcctaaaatgttgtgattacaggtgtgcgccagtgtgccctaaataatttcttttttttttttttttttttgtatttttagtagagacagggtttcaccatgttggccaggctggtctcaagctcctgacgtcaggtgacccacccacctcagactctcaaaaatgatttctttctatctcctataacagtttgaaattacttaaagtttgtttcaagtagaaaaaataaaaagaaagtgaataaaaataaattgtagagttaaaaatattagaagaaattacaaaatatgtatgtaaacctggagtggccaaaaatcatgaatttgatttatttataaggttttattaaaattagctttagtgttgacaatacactattaccgaagtaaaagttgttgaatacattcaaaaagagagagagtaaaaaagagataggacccccattcaatcgctaggagatgagacagcagcagagatggaaaagaaactttataaaattcttctgaaattctgccacctttcttcatattgctcatgtttctcatgctgagagtagctgtgcactttgggtgtttacagagaaatttcttttaagggaatatattctgactgacttgattaaacttacatcttgtcagagctttttcttaggatctttttaactttcgtctctcaaaataatcttgctcagatggagatctgtttttctctccaatgctttttctgtttcagaagccctattagtatcccatggtgtctgaataaagtgggctgtcacagtgagaacttttggagctatcactatctagagacatgctggaaattcagcagtattttttccgtgtcacaattaaaagtagaaactaagcctgaaacactgctcccatttccattattgtgaaggttcaattctatccagggggcctgcaggctctcctcctgcagcttaggcttagctctctgatgtgacactagagtgctgctgtggcaaatgagattcacataaaatgtcagctgtgctctgggctgtgcctcagtggcagatgatagaggtccagagagaacactagcaaccaggagaaagcaagcaggaattctgtagcccagtgccagggagtacagagccactgctctaaaatgtaaatagccaaaaagatagaacactattaaaccatttttgaggcagagtgaaatcctaccttcagcaggcacctggctttaagctgctaaactacgtcctgttatgaagatgtgaaaagtttatttgtcgttgaatataagtaattagcatacacagatggcctcttcaatctccaggtgaatttaggatgaactatgtatgacatggtgctgtaaattcttctaattgtggactaattatggtgaccatctttctgtctttgtgatctgttaaacagattgactatgatgcttgttacattcaagcttagttgtgtaataaaaccattttctttctgttctattactgggaagtttctttggggctggagaacgttttttttctgtttcttttttctttttttcttttttttttttttttgagacagaagtctcactctgttgcccaggctggagtgcagtggtacaggtgtgagccaccacacccagcccgatttttctgttaactattgtttccaaacactgtctagaattaccagacatgatataaacacataaaatgccgaccagaatttactctagaggggattttccttctcaggcttccagtcaacttatacttatgcagcaaagtgcatgctgtcccctaaatacacaggcagaattgtgtctctgcctatttggtatctatagtcctctacagtcacttctagagaggctagaccacatttctacaaacttcacagggcagcaatcagtcactttacctctttcatggactcttgtatgttcagacctgaaactgattcagatactatgaagcccagaaacttattcagagtaacatgtgtgcattgagtagacatatacacacgagaatctccactttccccttcctcctcatgctaaaatgcccacaaatgtgcaggtaaaacctgctgcgactccagcaattcagaccttaaatctacagctccaaatttttaatcaaggtcttgagatttttatcttaagttccattttatctgaaaaatgcaagtcttttggttatcaaactcagagagacattaaaatgaaagtgcagttatgtatttctcccccctttgaactatgcattcatctcttgaaagtgttcactattggcacaagtagctataaattaaacaataatcaatgttatttctgtaaataaaaatttctgaaaaacaactttgtatcatcccagtccctgtctctctcttgtctgtagaaatcctcttttaactgctactaatcaaagtgtagattccaggcaacttgaatctttgctcccagattacaatccttaagttgacccaaataaactgtctacttatatttatgttgtgtcagcttttttttcttttctttgaggcagagttttgctcttgttgcctgggctagatggagtgccaaggccctgtctcggctcactgcaacctctgcctcctgggttcaagtgattctcctgcctcagcctcccgagtagctgggattacaggggcctgccaccacaccaggctaaattttgtatttttagtagagaagaagtttcaccgtgttggtcatgctggtctcgaactcctgacctcaggcaatccactcaccatggcctcccaaagtgcttggattacaggtgtgagccacagcacctggctgcttttttttttttaatgtacacttatcatttagaatgtgctagaggggcctctatgagggcatctctcctttgattgtactcctcttgctgtgacaccaaaggatgcagagacaagtttattttacctagaatctgcagataaggtctggctactgcctgggatttacagaaaagggccaaactttggatagaaaatgtacagaaaactaacaaaaggcattttctgcattgtgagatgtcaacatagatatcttacagcctccatttgggagtgtggaattatgagatttttcacatcttgttcattgacctgcgacagttatgtcagagtatccaggaggaaatagcatctgatggcagaatctgtaagtgtaaataagcatcttaggagtaagagatcaaggccacaaagtatccagagctataaccacaactatgtttacctgtaaaatgtgatttttgtattttacctgtaaaatgagtatttttttctttcttttatgcaagagctagcaaatcaggacaggtaatccaggttctggagctccagcaaggcagtttcattttctatttagaatcagcctgagcctctcccgactggattatcattgggctatcagctcagggtcactgggaattccttcaaaatcacctagatgtctttgaggtatttgaggatgtccagagcagaattgtgtcaggctgagaagagtggctaattctgtttctgtcttagtataagagaaatgaatcatcctgtgtttgttcctcccctcatacaagaggtgtcttcggttggtacccagatgagaatttctccagtgtcctggtatttggatgataaacaaggagtaaatctggaggcccaaatagataaactagtttcttccattttatatggccgttaaaaaaaatacatgaagcagtcatggttcctacaatccagaaacttttagtctagactagcaactggataaaaaattgaattgtgcatcatatggttggtccaacaaatagatgtgtccaaaatcttgggctttatttaggccactttctttatattgttgtgacttctgatgtctacatctgaaggcatacttatgaacagccttgttattataatttctttttcttgagaccgagtctgttgcctaggctggagtacagtggtgtgatctcagctcactgcaacctctgctgccctggttcaagtgattctcctgcttcagcctcctgagtagctgggattacaggtgcctgccacctcacccagctaatttttgtattttaggtagatatggggttttaccatattggtcagtctggtctcaaactcctgacctcatgatccactggccttgggctcccaaattgctgggattacatgtgtgaaccaccatgcccagccttataatttctatttcttttactttgcttagtgtacatatttattttctaataaaatttccctagaaaggccaggcatggtggctgaaacctgtaatccaagcactttgtgggggcatagacaggtggatcatgaggtcaggagtttgagaccagcctggccaacatggtgaaacaccgtctctactattaatacaaaaattagctgggcattgcggtgcacacctgtagttccacctactctggaggatgaggcagaagaatcacttgaacccaggaggtgggagttgcagtgagctgagatggcaacactgcactccagcctgggcaacagagtgaaactccctctcaaataaataaataaataaataaataaataaataaataaatgaaaaactagcctagaaaaccttaagggatttgtttaaattgcatattagtacatagtataaagttgacaaagcagtgtctagaaaagattaaaattacagaatctctgggatttaagtttcttttaggtaagcttagaaaaaacaaaactggtggtacttcagtggcatggagaacagaattcaacatagggtcctcactgcagtgtctcagacctgttcagatttatcctttttggaggccttatttaggtctgactgtaccttggagtctggcctcacagaactgagtagaagagatcagagttttggctggtgaatcctgctgtctttctagagctggtgttcacaatttcctgaaacccaaaagcagataaatgggaaaaataaagaatgtattttagggtcttagtttttaaaggctctattaaaaccagtgcttggagagacattctatttagcaactggttttttcccctgcagatccagtaattgctccacaagtcacaaaaaagtaaatataaagagaataaaattttctctaaactacgttaaactcttcctttattatatctctttcacctgtctgtatttagcttttattctgtacaattttattaaaaatttgagaaagagaaatagaagaagaaataaaaatgctgggccctttatctaaatcctggaaattattaaacactgagtaccagccgggcgtggtggctcttgcctgtaatcccagcactttgggaggccgaggcgggcggatcacgaggtcaggagatcgagaccatggtgaaaccctgtctctactaaaaatacaaaaaattaactaggtgctgtggtggatgcctgtagtcccagctactcaggagactgagacaggagaatggcatcaacccgggaggtggagcttgcagtgagccgagattgtgccactgctctccagcctgggcacagagcaagactccatctcaaaaaaacaaaaacaaaaacaacaaacaaacaaacaaaaaattgagtaccagatttcagggcattatgagaattaaatcacataatatgttatgcccagtacagtcctctgtatcctagttttgagcacatagtacctgtttaataagcattgtattagtacatgtgtacatgctgttttttaaatccagacttattcagacattactgccttctgtttcctctgtaaactttaaagagacagcaaagaatataaaactttaggatggagatgggttgtccatatttgtacccagaagtgtttgattgcgacaagagtgctgagtgttaagagaccatgggctgtgcctgctttctctaactaatgctagtaatgagacaaggggaagcaacatcagcactgacaggggacttgtttaaaatgcccattcatggactcttttcaaacctgcagaatcacattacataaagtggggccaaaattaccaagtcatttataagctcgttaaagcctgagaggcaatgcttagcttagtggttatcagcccaggcttctcattaggatcaaatggctaatttgcagaaatctcttgtgccctccccacagcttctgtttattgttgtgggtggaaggatccatgtttttgagtgaagggcctcatgtgactctaaggtgaggccagaatcaagtatgagggtttcaaaatacattcatgagcattaagttccatctttgcactaaacagcagtcacaggggtggtgctgtttggatttggtagggaaaggtcagtgtggcacatatttgcattactgtagcagaaattgctggtgtctctggcaggggagggcacctgaagacagaaaaggagaaatttatatttttatcttcatggagcagctcattattcctgaacttcttctgttttaaatgacagaaatgggtggactttttctgtctttttctgccagttgatgtcatgctagcaggtaaacatgtggtactgacacctttaaaggcatattctccatatgcaggtgtaatttgttcagagagtctcatctgagaaggaattctagagaaggaggagaaagaaaaaaaatggcttttcttcaggtaaacatgtgtcagatgaagagctatgtccactctgcctcctggactgccatgcatttagtacccacaaacctttacttctctacttgtgtttttcctccctaatgattttgatttaactacttcttaaaattcttatgatagtcaagggtctctgaaaaatatttttttcctatatcccagagccctccctacattctctacatcatagcttcttatatgtcatgcaggattatcagcaagaatttatgatctgcaatattaaaaatattccctttgtggctgttgaacatgaaaagatgtggatactcaagatttctactggagaaaactgtggtacttagtaaagatggagaacatgtaatgttacggctccatctgtgtgttccattagctctatgcagaagaagattaagaaaatccttatttaactgggatgacatttattactcagaaagttctgaaaaaaaattaggagatatctgctctctagggtggcaaatgaagcctccttaaaattactactaacaattacagaacataggagttatttgtattttgaagtttccataaaactgatgtttctttatggttaaattcagattctatttacttttttggggaaagaatatttcaacagtgatgctgtgttctcctgtgtgcattagcacgtcataaaaatttgtcctcctgcagttaatgattaatgaatcacttagtgaaattgctgacagatttttttttactatggagttaattagttttctctttattagtaagtatctttatgcagctgatgtgcataaatgatcacatttaatctggcagctgtctttttttcttatgtttttctacatatttttctttggtaaatgaaggctcttagttttgtttacaggcttgaaaaactgggaaaaataccgactcttgcacttactgaatatttgacaaaatatccttcttgggacaaaaacattggcattactggtgagcttgttagaaattcaaaaaattggctgagcatggtggctcatgcccgtaatcccagcactttgggaggctgaagtgggtggatcacctgaggttgtgagttcgagaccagcctgaccaacatgtagaaaccccatctctactttaaaaaaaaaaaaaaaaaaaaaattagccaggcgtagtcacgcatgcctgtaaccccagctacgcaggagacaaaggcaggataattgcttgaatccgggaggtggaggttgcagtgagccagatcatgccattgcactccagtctcagcaacaagagtgaaactctgtctcaaaataaatacatttaaaaatcagactttataccagatcttctggaaaaaaaaaaaccctgcaaaacaaggtcttcagcttattctacacatcaaaatttgagaggtgctttctaactcaacatgtcttttccatctgaaaaatattcacaagtcattttgtatgatgtaaatatagcactcaaaaatatacatgtttgtgttcatgtccttaattttatactttattatccagaaaaatatcattatatgaactgatcttgtggatattatgctgctcttttttctcagagatagagaatacattagaaaatatttgtgttgaaaattattttattggataattttagtcagtcctataagtcagaatgagtgctctttactctctcatttcaccttaagtcaaattaaaaattccgctcatggcaacttagtaaaaatgtgtgtgtgtgtgtgctttacagtgaccactgcaatttagggatgtggctatagaattctctctggaggagtggcattgcctggacactgcacagcacaatttatatagggatgtgatgttagagaactacagacacctggtcttccttggtgaggataacttgagtacataattcataatatatcctaaagattttatttctctttttatttttattttttgagatggagtctcactctgttgcccaggctggagtgcaatggtgcaatctctgctcactgcaacctcagcctcctgggttcagtgattctcctgcctcagcctcccaagtagctgggattacaggtgactgccaccacgctcggctaatttttgtatttttagtagagatgggatttcaccatgttggccacactggtctcgaactcctgacctcaggtgatatgcccgtcttggcctcccaaagtgctggaattacaggcataagccaacatgctcagcctatttctcttttttgtagaatgtttttagacctttattctttgcataaaaaactttcagatcccctttttccagaaaatcttcaaaatttgttcatttattaaagaatttcttcaagatgtttcatcttaatccaaactttccacattcctgagttgagctgtattcttcactctaaattagtggtaattccagaaatttagtggcataaaatatttttgtccccacctgaaaatcgaattgccaccaccaatttttgattcagcagtaccaggtagtaaaattaagaaacccacaaattgaaagtattttctaaatatttagaaatttctgttataacttagtattttgctattaatttgctagaatattttatcacattctctctgctgagcacattactagcttgtaattggagaatatgagaaaaatttatgtatttatttttaataaaacaggtattgttgtctctaacccagacctgatcacctggctacagcaaggaaaagaaactttgaccatgaagagacaggtgatgattgccaaacacacaggtaggtgttttttttgctctcacaaaggggcatcttctgtcttatgcttttaaattctctaaggattctgcttttcttttggtgagcttccttcaagttcacagtgagagccaatgtcctcttcatggcatagaagagactgcacaatctgactgcttttccattattttggggacacacaaatatctgcatgatgttgagaaactaaaactatgttttaagttcccttttttcatcaggtttgaaatgtgtgaaagtagtagtttctgttgcatttttttgttcatttttctgcacagtccattctgtttttattattatgtggccttgaaatatagtttcaaattataagtatgatatccttctgctttgttctttgtcttcatgattgcttcggctattcaaaatttattttagtttcatgtaaattttagaattgtattttccattactgtgaaaaaaaaccacagcaattttgataggaagtttattgaatctatagattactttggataatatggcactacaataatatttattctttcaagccatagacaaaatattttaaaatttatttggatcttctctaatttatttatttttttattgtaaaaatgttttacctccttggttaattttttcctcagaaatttactaattaatgctctagtaaataaacgtttttctttatcagacagtttaagtgcatgaaaccatacatacacttgtatgttaattttatattttgctgatttactgagtgtatttattagtttagataggctttaatgtactgtttatagttttttaaatgtatgattgtatgacctacaaacagcaactttttactcatttttcaatttcaatggttttttttaaatttctttgactaattcttctgttacatacttccagtgctacattaaaatagaagaattgacaaagggcacaatatagttttgtattggtgtctgaatttgatggagcagacacctcttcaagtttttgtaaactgattttagattgtaaagatcttcttttattggttccttagggtgatgagatgccatctgaatttgtagtgaagagggattgtagcttggtcacaaggctgctaggtctgcactagggttcacccttagttggcttgttacaggggcttgggttgttgtaattcccattttatttttggacagactaaatatccttcagtacttttctcagtagggcaggcactacagcatgtttttgcagtcgagtctgcatatgctgggccttaaatcaggatgtggatgagtgtggctttcatgagtatgagagagcatttcctcaggtaactgtgtgggtttctatgcaggaagaactgatcataaactgtggctcaggtaactgaaactgagtcattgaaccacttcagggacctgagtaaaggccaaggtctgcagacctgcctgcatggctgtaaataggtgccttcctctgggtctctagaatggcaggacctctcccagacagtggctgggaggagtttgggacggttatatgataagttcagaattctcagaatctcagtttgggaccaagttgggtgaactctatcctggtctgtagccataaacaggaatcctgcactttcccacctaattgagggcctgctttctgagtagaacacttttcaatcctaagctttaacagagtttcatcactccttccctggatctcaaatctctcttacaggcacttattttggagatggggtcttgctacataacccaggctggtctcaaaattctggcctgaagcagtttttccaccttaatgtacgatgtagctgtcattacaggtgtgagccataatgcctggttctctcataaaggcatttttgtcagggatggctgacattattttgctgtaaggggatatgaatgtaggggacttttaatcttttcatcttactgatgtcactctccctatacatttttactttccattttctatttcaaatttttctgtaattttagattcagatatttaggacaatatgctagaatttgcatggtatgcctgatgtagttagaaaattagtaggtactccatatttactaaaagagttacttataaatgtaagtttgctacaggcaaaaaagaattataggattttcatctactttcttcagcctatatataaataataacatagtttatttcccaatatttgttttacatatcagaggatctaattctattctgcaatatatacatgtatattttctgtctttaacaatgtaagactattctttgcttctaaagttagaatacagcagtttcattttgtgtaagaataacatattcaaaacataaaactaactctagtttttttaaatgcttatttattaaaagtttctcattagaatcttctatttatgattatactgcatattttctgaaattttactgccacacagtgcatgccaatgattcaaaatacctgcatttaatgagtacacagtaacagctaaatattgcagttacccagacaaatttttttaaattatttttttgagatggactcacagcctgtcacccaggctggagtgcagtgctgcaatcttggctcactggaaactccacatcctgggttcaagcagttttcatgcctcagcctcccaagtagctggaattacaggtatgtgccaccacacctggctaatttttgtatttttatgtgagatgaggtttcatcacgttggcaaggttggtcttaaattcctgacctcaggtgatctgcccgcctcagcctcccatagtgctgagattacagatgtgagccaatgcacccagcctgacaaattctttttaatgatacatcaatgttgcataccaggttttatgagtaaactcttctcttattattgttttgaagtttcacattagtgtgtttctttaatgaaggtttctgtttttttgggggggacagagtctcactctgctgcccaggctggagtgcagtggcatgatctcagctcactgcaacctctgcctcccaggttcaagcaattcttctgccacagcctcccaaattgctgggactacaggcttgtgccacaacatctggcagatttttgtatttttcatcgagacagggtttaaccgtattggccaggcttgtctcgaactcctgaccttgtgattcatctgcctccgcctctcaaagtgctgggattacaggcgtgaacccccgtgccaagcctcatttatatttcaaatagggtctcacttggttaaccaggctgatttgcagggctcactgctgcccgaacctcccaaactcagatgttcctctcacttcagcttctcaaatagctgggttacacatttttgccgtcacacccagcttgcttttttgtattttttgtagagacagagttttgccatttgcccaggctcctgttgaactactgagatcaagtgatcagcccaccttggccttccaaagtcctaagattacatttcattttattaagtagtttaattaatttatatttaaaataattgcttaaaaaatgaagttgttattaccagttatactgttattgttttatgtgtttctagtagttatatttttctcattttctgttttactttcttaattttcacttaatcttgtactagcatgctttgattatattttgttttcttttgcatactttctataaatattatctttgtaatcagcttgaaaactgaagattacatacaccttaaagttaaaaaacaatatattttaatcttataacggcctccattgaatacaaaaactatgcttctgtattttccagtttgttgttaatattaaaattattattattattttttgagatggagtctccctctgtcgcccaggctgtagtgcagtggcacgatcttggctcactacaacctccgtcgccctggttcaagggattctctgcctcagcctcctgagtagctgggattttaagctcctgccaccacgcccagctatttttgtttgttttagtagagatggggtttcaccatcttgaccagtctagtgttgaatgcctcacctagtttatatggtgtatctattcacagatttatgcggatttacatattgttttttatattccataaaagcactttaaaggttttatgtaccatcattttggtttttttgttttgttttgtttggtgtgggattatttttttcagactgagtcttgctccatttcccaggatggagtgcagtggtgcgatcttggctcactgcaacctccacctctcggcttcaagcaattcttcttcctcagcctcctgagaggctgggattacaggtgcctaccaccatgccctgctaattgtttgtatttttagtatagatggagtttcaccatgttggccaggctggtctggaactcctgacttcaagttatctgcccgcctcagcttcccaaagtgctgggattacaggtgtgagccaccacttccagcctgtaccatcattttgatagtaaagaattccatatgtgtccatttatttacattagtgtatagctttatatttatatatgtttttatgatgctgtccagggtcaatttgtgtttcaacataatggacacattctaacatttctgtatttttagatatagaatctcattatgttgttcaggttgatgttgaacttttggtctccagtgatatgactgctttggcctctgaaagatgtaggattacagacatgaacaattgtgcctgagcctcttgtagtatttttttttacttttttttttttttgagacggagtctttctctcctagctcaggctaaagtgcagtggcacgatcttggctcactgcagttttcgcctcccaggctcatgcgattctcttgcctaagcctccctcccgaggagctggggttacaggagcatgccacaatgcgcagctaatttttttttttttgtagttttagtagagatggagattcaccatgttggccatgctgctctcaaactcctgacctcgggtgatctacccgccttggcctttcaaagtgctgggattacaggcttgagaaaccgtgcccggcttttatttttttaaatttttttaagagtgagtctcactctgtctcccaggctggagtgcaatggcatgattttgactcactgcaactcccacctcctgggttcaagcaattctgcctcagcctcctgagtagctgggactacaggtgtgtgccaccatgcctgggtaatctttgcatttttagtagaaatggggtttcaccatgttggtcaggctgatctcgaactcctcacctcaggcaacccacccaccttgacctcccaaagtgctgggattacaggcatgagccagtgcacccaggcccatgtattatattatgagagacagtgatagttgtgatgaatactctcaccttttattttggaaagtctttatttttatcttctttttgaagtaaagtaattttgaatcgagtattgttagaaattttttttgttacatcaaaattggggaagttttcagtttttttaatcttcgtgtaacctctatattactttttccctatattctaagatttgtttcatgaatacattgatctacttcatggtatccaataagttttatattctatgttttacttttgttccacaattttatatttttgtgttatatatattttgggtatgccacatcacaccagttaattgtattttaattttttagtttatattataattgtatatgacaatttttaactctgtacaatttaagacagtatggagcaaaattaaatatgaataagccatatgtctattgccaatataattatttatatgtttgtttgcctggataaatattatctttgtattttttgtcacttgtatatttattgtgtaggtttgctgtaacagttttttttttttttttggaagagaggtttgctcttgttgctcatgctggagtacaatggtgtgacctcagctcactgcaacctccgcctcctgggttcaagtgattctcctgcctcagcctcctgagtagctgagattacaggcatgcaccaccatgcccagcgaattttgtatttttagtagagacggggtttctccatgttggtcaggctggtcttgaactcctgacctcaggtgatctgcctgcctcagcctcccaatgtgctgtgattataggtgtgagccaccattcccagtctgtaacagttttttaatcctgtctaggtgagtagtcataaaaattctcctgatttcagcatttatttatgtgtgaatctatattttttcggtgggggagaaacacctaaagaaatgtgttatgtgtcaaaaacacataacaaaatttacaataaaatatttctaggctgggcacagtggctcacacctgtaatcccagaactttgggaggccgaggcgggtggatcacgaggtcaggagattgagaccatcctggccaacatggtgcaaccccgtctctacaaaaatgcaaaaaattagctgggcttaggtggcgggtgcctgtaatcccagctactcaggagggcgaggcaggggaatcgcttgaacacaggaggtggaggttgcactgagccgaagttgtgccgctgcactccagcctgggaggaagggtgagactccattttaaaagaaaaataagtatatatatatgtatataaatatatatatgcttctaaatattcagtttggtcatattaattctgttgacattgttatgcaacatatcactagaatatttttatcttgcaaagctaattctcaatagtcattaaacaactaccaattctagggccgggcgcggtagctcacgcctgtaatcccattactttgggaggccgaagcaggcgaatcatctgaggtcaggagttcaagaccaacctgaccaatgtgcagaaaccccgtctctactaaaaatacaacaaaattagccgggcatggtggcgcatgcctgtaatctcagctacttgggagcctgaggcaggagaatcgcttgaacgcgggaggtggaggttgcggtgagccaagatcgcaccactgcactccagcctgggcaacaaggtcctaactcggtttcaaaaaaaaaataataataataaagaaagaaagaaacaactaccaattcttctcattttgtggtacttttcaaacaccactctgttttctgtttctaagagtataattgctttgtatatctcatacaatctctgtctctttgtggatggcttattttattttgcataatgtcatcaatatttatcttaatagttgttagaatattttctgctttttgaaatctgagtgatattccagtatttttatatctactgaatgatttggagacagaaatttgcattgcttttacctattggcttccagtaacaatgttacaatagttatgtgaaagttaatatatgtgctgcattctgttttattagtctacattttcacctttataatcataccgaattgttgtaattctatacgtttttgatgtgtttgaaatcagaaattgtaatgcctccaacattgttcctttttctcaagattgttgggtactttattatctctttagattccatatacttttggagttggtgtttttgtttcttcaaaaatgcaatgagaaatttgagaaagattgtattaaatctgtagattaaattgagcagtatagacatcttcacaatattaattatttcttttttcattgtttgtttttgagatggggttaaattcacccacctcagcctcccaaaatgctaggattacaggcatgaaccactgcacccagcccagttatttcaacaagtgcatgctcaagagtgtgttgtatcatttctatatagatgtaaatttatcatttatttatattattgttttgtactctaattctatttttgtcatagaaaataatctatgaaatttcagttgtaaataatgtgttaagactttgtttttggcctaacaggtggtctataaagaagaatattgtatgagctatcgagaaggctgtgtatcctgatgttgttgaggagtgttctctataccttcattagaaataattgttttttactgccttctagtcctctgttccattactaatattatgtcttgttttattattattacagaaagtggggtattgaaatatcctactataatcatattgctctctctgtattcaattttgttagtatttgcttgatataattgaaaccctaatttgagacacacacagaaaaatacacacacgtgtataaacaaatttgtcataggttcccagtgaatgaatctatatattgtttaacgcccttctttgtctttttgaagttttgacttaaagtacattttataaaatatgacagtttttttacttaagatgtagcttgtgtaatattattttgacctcttctgctgtaatttggttaatatttatataaaaattctacttttgtcttgcaactttcagtcttttcttgtcattagatctcaactgactctttaaaaaggtaagttgagtctgatttttaaaactttttaatgaacctttttattgaaattatgtctcttgaatggaaagataattgtatatatttaaatagttttctgaaagagaaaaacttagttattttaattgttttatttgattattgtatccttgtgtgtcattttctctgtctttttgtgttgttttgatttttatattgacatgctttcagttttctcttattgttttttgtgtatccatatggattttttttagtggtatcttagggaattacctaaaacctctaaaagattcaacaatatattttaatgtagtaagaaattagcttcagttgcatacaaaaattcttattacatctgccttaaactttgttactgactttactaattacattttttatgttgtatattcatgaacagatgcttataatttctatacatttatcttttaaattttaaagaataattaaaaaagttttctgtaccattatgataatgttaagtaagaaattctatttttatgtgtgtacatatctttcccagaaatttatgtattttcatatgattatgtgttgttttcttgcattacgttattttctgtagaagaaactcctttcagcgttcttgatatgtaggacatatgcagtgccaatataattctcaagatttggttattttggaagaacttctttctatttggtagtacaattttgctcttatggtaatactcccatttgacaacttattttgaaattataattttaaaaatatcacagtttccttctgatctgcaaaaatttttttgataaattcactggttatctgatgagactatgcttatagattattattatatttatcttgcagcttgcaaaattcttatctgtgatttttgaaattttgcttatatatgtgtttgttataaatatatgtttgagtgtatcctagtttgttcagctttttcatgtttaccccattttttcttacttttaagaaatttttcagttttttttacatccactattttcattttctgctattttaatattttttgtggttaatctcatttttccgatcttcagtagttgtctgtgtttctatataacttcctggatattattcaatttattttatttatttattattctttttttttttttttttctgagatggggtctcaccctttcacccaagctggagtgcagttgtgtgatctcggctcactgcaacctctgcctcctggattcatgcaattctcctgcctcagcctcctgaggaactgggattacaggcacctgccagtatgcctggctaattttttgtgtttttaaatgaggtgggttttccccatgttggctaggctgatcttgaattcctgatttcaaatgaactgcccatctcagcctctcaatgtgttgggattacaggtgtgagccaccatgcttggcctattttattttatttttgagacagagtcttgctctgttgcccaagctttagtgcagtggcacatctccactcaccgcaaacttcccttcctggattcaagcaattctcctgtgtcagcatcccacgtagctaggattacagtcagataccaccaggcccactaatgtttgtatttttagtacatacagggtttcaccatgttggccaggctggtctccaactcctgacctgtgattctaccaccttggcctcccattgtgttgggattacaggaatgagcctccaaatatggtctgttcaatctattttgaatttttaaaattactttatacatttttaatgattgcttttgaaaattttataatttttttgatggggcaatgttgccttaatattttgtatacattgtaatctttgatcgatatttgaacattaacaaaaagccacctgttacaatctttataatatagctctgtcctggcatagtctgaaatcaattgtcttggctagagattctgggaatttctcaaacctgtttttaggaggtgtcttgtctaaaattttgtgtttattgtttagttaaatcagtttattaatatttcttcttaataatcagtaatcacttgctacacccatttcctgtttggggtactgcagtttctctgcttttgtaacatttaccttaagccttggcagactcaaactgtcattccaacatatatcaccatttctttcagcattttatgttgtgggagaccttaaccagtgccttaaaaagtccctagaagccagaaataaagatgtatgtgccaatatttttcttgtttttttaaaaagaaaccaggagttggcaatttacatttgtgtgtgtgtgagacagagtctcactctgttacttaggctggagtgcagtgacattatcttggctaacaacagtctctgcctccagagttcaagcaattctcctgcctcagcctcccaagtagctggattacaggtacctgttaccatgcctggctaatgctttttatttttagtagagacgggtttttaccatcttggccaggctggtcttgaacacttacttacccttgtgattcaccgacctcagcttcccaaagtgctgggattacagacttgagccatcctgcctggccaggaatgtacatttaaaggcacaatgttatactggagagcaggaagaagtgaagaatatttcttctaaagacagccattagaaatataaagggggttgtagtgcctttacttgcatcatagatcttattgcacacattttgtactagaggaaaaccctgaagcagttgctcaagctttgttcaacattggaatttatattggagaagagtcctgaaatataatgaatttaaaaacacttatatttcaaaaactacagcttagaaaacaccagagagtttatactaaaatatatttttgcagatgcagtaaatataaaaaaaattaatttaaaattgattttatgtaaatatcagagaatttacggtagaataactaaggcactgacatttcagacattacagcaaatcagtgttgagtataaaaactaatctacagctacagctgttagataaattgcttgtatataactttaaaaggagtagatttttgaagcatggtaattctattgaaagtatacttatttgcggccttgagcagtggctcatgcctgtaatcccagcactttgggaggcagaggtgggcagatcacgaggtcaggagatcaagaccatcctggctaacatggtgaaaccttgtctctactaaaaatacaaaaaaattagctggatgtggttgcacacacctgtagtcccagctactcaggaggcttaggcaggagaatggtgtgaaccctggaggtggagcttacagtgagccgagatcacaccactgcactccagcctgggcgacacagcaagactctgtctcaaaaaaaaaaaaaagaaagtatacttattcgcttgaaaaaaattttttgaaaagtgaataatgatgtaatacaggtttcaagttactttatgctgttattttattcctatattattcacacatgaaagcatgtgatcaattgttgatgcatcagagatactagacattgttttttattagttgggcattatttattaccttttctataaaagagtaagaacattaaaatgtaagatgcatgatgaaaatgtaagtggagaggctctttgtagtaaacctctattaagtaatgtataaggtggtggtttgtgttctcatttgtgtaatcctagcctatgacttaatgttgacactttgctttgtcttttggatggcctaacctacattaacatatacgcagaacattttaaacctttttttcaaaaatcataaagaattactttatcaataaacaaaggtaaacaataagctgagggttcagagtaatacttttctacattatagtgagagaaataaattattaattatagtcaaaagtattaaaataaattagtattgcaggctgggcgccgtggctcatgcctgtaatcccagcactttgggaggctgaggtggacggatcacgaggtcaggagatcgagaccatcctggcaacacattgaaaccctgtctctactaaatatacaaaaaattagccgggtgaggtggcaggcgcctgtagtcccagctactcgggaggctgaggcaggagaatggtgtgaacccgggaggtggaggttgcagtgagccgagatcgtgccactgcactacagcctgggggacagagcatgactcagcctcaataagtaaataaataaataaataaataaaaataaaataaaataaattagtattttactaattgtacttttaagtaataaaatgtattacatttaaaaattgttagattatgtgtgaacttaatttttttaccatgttaagcctattgtgcatttaatgaagcattttttttaatgaagcattattatgccactaactttaaactatttctccttacccaagcgtgtaaataaaagatggtagcaatatactatttggtatatagtggaataacatctctagtaatcactttgccaatggctttaaactgtaaatgtattgaagaatattgttcccataggtcaaatttttattctttattcttattgaaatgtattattagtatttatgagtatgtagtatgtgtatatatttatgccttatatggcatattttgagttaggcatataatatatagtaattactttagggtaaataagatagccatcagctgggtgtggtggctcatgcctgtaatcccagcactttgggaggccgaggtgcgtgaatcatgaggtcacgagattaagaccatcctggccaacatggtgaaaccccatctctatttaaaataaaaatattagttgggcacggtggtgcgcatctgtaacctggaatcccagctacttgggaagctaaggcaggagaatcacttgaacctgggaggtggaaattgcagtgagctcagaatgcaccactgcacttcagcctggtgacagagtgagactctgttaaaaaaaaaaggtatccatcacttgtagcatttatccttttattacaaactgtaattatacatttttagtgtataatttagtgagaaggattgcctggtgtcaggatttcaagaccattttgcccaacatggtgaaatcccatctgtactaaacataaaaaatttagttgagcatggtggcacacgcctagaggctgagtcaggaaaatcacttttaactccagaggtggaggttgcagtaaggcaagatcatgccattgcactccagcctggttgacagagcgagacttcatctcaaaaaaagagaaagaaatataaataaaatccttacatttctgagtcctgaaaaattattaaatatttgttatatagttttcttttaacatttggtctctctgcctgcgaacatatagacttttagttttaatttatgtggggaaaagtgagagaaatcagattgttactgtgtctgtgtagaaagtagacatgagactccattttgttctgtactaagaaaaattcttctgccttgagatgctgttaatctgtaaccctacccccaaccctgtgctccctgagacgtgtgctgtgtcaactcagggttaaatggattaagggttgtgcaagatgtgctttgttaaacagatgcttgaaggcagcatgctccttaagagtcatcaccactccctaatctcaagtacccagagatgcaaaacactgtggaagaccgcagggacctctgcctaggaaagccaggtattgtccaaggtttctccccatgtgataacctgagatatggcctcatgggaagggaaagacctgaccatcccccagcccaacacccataaagggtctgtgctggggaagattagtgaaagaggaagacctctttgcagttgagataagaggaaggcctctgtctcctgctcatccatgggcaatggaatgtctcagtgtaaagtccaattgtatattccatctactgagataggggaaaactgccttagggctggaggtgagacatgctggcagcagtactgctctttaatgcattgagatgtttatgtatatgcacatcaaaagcacagcacttttttctttaccttgtttatgatgcagagacctttgttcacgcgttttcttactgaccttctctccactattaccctattgtcttgccacatccccctctctgggaaatgcccgataatgatcaataaatactaagggaactcagaggccacggcaggcaggcgcggttcccccttatgctgaacgctggtcccctgggctgatttttttttctctatactttttctctgtgtctctttcttttccaagtctctcattccacctaacgagaaacacccacaggtgtggaggggcaacccagcccttcaaatttacatagagttaaatatacacatattactctgaagataaatcttaggtgtaagaaaagtattaagtgagtgtttgtgtgagtatgagtttgtacatattttcaggagaaaagagcaataattgcaacaaaatgaataaataaggtgactaatagaaaactaaacacctcaaaaatgctgaaagcaaatctatactttttgctttgtcttgaattcctttattcattttattttattttatttttttgagacagagtttcactcctgttgcccaggctggagtgcaatggcacgatctcggctcactgcaacctccaccttttgggttcaagtgattctcctgcctcagcctcccagtagctgggactacaggcacatgccaccatgcccagttaatttttttttttgtatttttagtggagactgggttttaccatgttggccaggctggtctttcattcctgatctcaaatgatccatccacctaggcctcccaaagtgctgggattacatgtgtgaactgccacattcagtgtgtcttgaatttattaatgtaaaatgttatggcttatggtttggattctccctagaatctgcctattaaagcacaggcatctttgtcttcagaaatgacactcttgagtagaacaataaaaaccctcttcaaacagaaaaaaataatcatttttaacacttattttaatgaaaatttaaccaacattgagtaattggatatatttttattgttttatgtgtgtgtgaatgtataaaatggtacatacaggaaaaataattcaagccagaaaaaagatgtaagttaatatttgtaatgaatgaaactggagagtagttaattattatttgcagataatatatttgtttatgtagataacaaaaggagcagaaagactattttaaaagtttatttaggtgggtaggcaacattttaagataataccctggattaccagtctgttgcacacctgctgtgtcatactttcctcttgagtgaaaaaaaaatgtatgactgtggtgggaaatcactcatgaaattaggttactcaactgttgactttgtgtttatcaaaatggagattattctgattgtgttaaacttaatcacaggtgcttctaagagaaagagacacatagaaaaacaacctgctggcctgattgttttgtgtgtttttctgtgctggcttactttacttggcataatatttttcaggttcatgaatattgttgcaaataacaagactttcttatttttaagtgcagagaagtatttcattgtgtacatataccacattttctttttctattcaactattgatggacacttaggatgattccataccttagctattgtgagtaatccacttccttccctctgttttgttttgtttgagatggagtctcattctgttgcccacgctaaagtgcagtggcacgatctcagctcaccgcaacctatgcctcccaggttcaagtgattctagtgcttcagcctcctgagtagctgaggttacaggtgtgcaccaccatgcttggctaatttttgtatttttagtagaggcaggctttcaccatgttgaccagagtaactttcatttgtttgtatatatttttcttccttttctatttctagaagcatgttaattttaaaatataaattatgaatgttaaaaaccttcattctctgtctttgattactattacaactgatttaaaaataagtttttttgaaattccctggataaaggttattacttcattattaacataacttgagacagcatagaaatgaaagtgaatatttgatagtaaaacagcaattatgtagctcctggtagtcatttaatctctcacccactctttggaacttctatcaagacaagaattctatttttgaaatgcttatgtttttaacaggattataagccacagccttccagcatcgggtcccaccaatgtatttggtggatccatttgtaaaccaagcatgtttctgatcttctgggattagttttttaaacgatttgcgccattggtcggggtgggaagggtggtttccttccatatctacaggacttgctcagtggtttttttgagctggcaagttttgtacatcctcatgtaaaactgataccccctttggttttggcttagcctggtcatgtatgtaccatttccattttatgctgctactttcttgggcatgccctatctggtaggttttgggggaactcatgtcccaagtcacaataggaatttcaggccacataaagacatcatggttgaagcagaggtgttccatttccagcaaagttcaatagcaagctaaaaattgcttcttgaagggatataatctttgctggcctctggcagtttgtaggtccgaaatccaaaagtaccctcttcccatgttgttcctgcctaaggctccaattagcatgttgatctaggacagttacttgcagttctactggcccatcccctataggccatagatccagggccagcttcaccacttgtttagcttgttcaaaagccatgctgtcttcctctccccaaagaaagtcatagcattttctagttgctgcatgcggaggttgtaaaatgttacccaagtggggaaaatgatgtttccagaatccaaacaagacaatacatttctggacctccttcttagtggtagaggttgcaaattgtagtattttagctttagcctttggtaaaatggactatttctctgtattccataggatgccaaggtgttggggtgatcagacccaacaccaggtcataggggctatgaagtctgatagagtcaaagaatgagacaagacaagttaaaagttcatagggtgggtccagggggccaactccaagcatggtggctgtgaagaccccaagctctgggagcccatgctatttataacttataacttattggtaatcaaacaaaaaagcagttggtgaggacatgtggacatgggggtagacaggtgaggatgtgcggatagaaaggtagtggtgaatcaagcgtagctgtgatggttgagcatatgctctgctacttgagataaaggagaacaggttcttctaattcaagacacaatcaatttatggtctcaggagagcaagaagcaatgggccaacgagtctggatacattccagaggctacaaggggttttatgccctgagcctgggttctgtccaagccacaaggggttttatgccctgggcttagactgtagtgtggcagggcagccttccaccctttggcacagagcttggtgttccacaggccacaaggggttttagaccctggaaccaggacatgttccaagactcttttatattatgtcagacaagcaagccctgcctcagctcttctgccaacaccaaggaattttacagtttgtgcaggtcctttgaattttactaaggttaatttcccatccttgagataagagttgggctcttacccgctccaagccccagctaactagttcctcagtttcaccctgaccaggccatttagacagctgcttttttcagcaataggctgatagctttgagcctgatcagtcaagtcataggcctggcattgggccagggccagtctggaagtaaaattagcattttccttttccagcttacatttctcttgtagcaactagcccttatcttgacacattaacttataagcagtaagcaaacaccatccactctggcagatccctcagcttctcctttgctgactggaatctcctgcagcacttcccgcacagtcaaaggtttaaattgcactaatttagattcccaattcccacaaagagcagttcccctggaccattcaaaagggagaactggaggagttcccatcgcgggatatgaggagtcaccgagcctccagccctgtccttctggccaaaaagtggcacacttttgttttgaatcctgttcgtgacgccgaaactgttctgtgcgggaaagaggcaaggggataagaaaagacagacacacaatacctttaagggtaaacaagcttcatcccatgtaaatggcaatgcagatatattaagcaaatgatataataagcaaaaaaaatataataagcaggttgatataataagcaagttgcaatgggaagaggagaagggaaaagtttgtgaagtttacgctcaccagactatggaagattcaccaccagagtgggaagcaacaacctgggctccagagtcggccacccatttgtgcacagatgaggagaggtctcatgaagcttcagtgcagtctgggaccttagctcatttgtaacaagttgtttggcatgaggcccggtcatgagggccctttgcaactgggcttaaggaacacaaaaagattaacttgtttttgcgattgtctattgtttttcaaaaatgaatgtatatgaatagattgaaatagagatttctccaaaacagcactggatgaatgcctctaggggctcacaaaacctattctgggacttggtgaccattgcttctgtccacgttcaattgacttcaaatttaatatttaactttacctccacaaattcctctgtcttgatgaatcggctctgtctaggcaaagggcaaagcgaaccacttgggccttacacaacctttacctcctcgattcaagcgattttcctgcctctgcctccgaagtagctgggactataggagtgcaccaccacaccctgctaattctttgtatttttagtagagatggtgtttcaccatgttggccaggctggtcttgaacttctgaccccaagtgatctgcccaccttggcctcccaaagtgctgggattaaaggcgtgagccaccatgcctgtccctgaatgatttctttctatctcctataactgtgaaatcacttaatggatgtttcaaactgaaaataataaaaagaatgtacataaaaataaaatacaagaagtcataaaaattagaagagattacaaaatatatatgcatatctcgaggggtcaaaaatgagaaattttgtttatttacagcgttttgtttatttatttatttaattttttttgagatggagtctcactgtgttgcacatgctggagtgcagtggtgtgatcttggatcaccgcaacctccacctccctggttcaagcaattctcctgcctcagcctctggagtagctgggaccacaggtgcatgccaggaggcctggctaatttttttgtattttcagtagagacgtggtttcaccatgttagccaggatcgcctcgatttctttctatgtcctatagcagtttgaaattacttaaaagttgtttcaaattgaacaaataaaaataatgtgcataaaatataaatagtttaaaaaattacaagacattacaaaatacgtatgtaaatctggagttgtcaaaaatgacaaatttgatttatatataaggttttattaaaattagctttaatggatactacactattaccaaagtaaaagttgattttctcttgaacaaaaatttgttgtattattaatatgacagcaaaatacttctgttcaccttttgaatacattcaacaggagagagtaaaaaagaaatagaattttcccatgctctgggatgtaagaattatccaatcagggacactgtgctggaaaccgtccaatcaggcacacagctgtagcgaacagcacggcttccgggtttggcggggcctttgtgtctctctgcagcctgagctccaggtctcttcttcactgctctgtgtcctctgcccctagaggcccagcctctgtggccctgtgtcctgtaggtattaggagatccacagctaggacgccgggatcccggaagcccggaaatggtaagaatgccggtccgacatcccgagagagggggaggggctggttggaaccggaaggaaatgtctttggcaagactcagctccagtcagtcagctccacaatttgtgccccgagttctccttacccagctcggcctcagtcctgttcagccataagatggcggctacacagaagcctggccccctgggcgtcctctcttccgtgcgcaatgactgtgtcctggcctggagccctctgtgggcagctctgcatctgcagcgctgtgtctctcccagattgtacagggatcatgagagggtcgtcaagggagaatcctgacttggggttcaggttcatgaatgggaagagctttggtccgtggggttcacagtttctcttttctcctattaaaaatgtatggggccaggagtggtggttcatgcctgtaatcccagcactttgggaggccgaggcgggcggatcacttgaggtaaagagttattagaacaagtaagttcctcttcaaagactcaacttctttgtcataagttgtaaatcaaatttatccctgctttccccttctccttttgttgcaaattgctcgtttaccctatttggaaaaagctggggtctaagccaaccgggatcagcttagattattgggtctgacccaagccaatagaggaaggacacaaaaacaggaactgtgttagggttaataaccccttcctggctgggtgcggtggctcatgcctgtaatcccagcaatttgggaggctgaagcgggctgatcacgtggtcaatgtaaggctcttgtattggtttgaaccgtgagagcgtgccaacagacaacaccaggcagtgtggagcaacatgctgttttagtgagtgccagggtgcaggccggctgaggcctacaatggcgtcagcaccaaatgaggacgaggcaggagttttattgtctccagtaaacaggaagtctcccagtctgatggggctgctacgtagtacccagacagcctctttctcaaacttcagggttacatgtcttctggccagagttgatgtcttccagacggttctcttcctgcttctgctatcttgctggcacacactgctgatgcaggtaggcttgcgccttgggactgggcctgggaagggaggagttactcatcccttcaagctttcagaccccggggagattctttctttcctctctttttggttatagaaagaaagggaaaaggggtgactttctcaataactacttcaggtgtgacatagggggtggcattggaaccttggaaaaaggtgcgtggctgggtttagatgggagctggttaatttttggggtattcttgagagacgggttggtgtccatcgtgttgttgaagcagaagcatcatctggattgtctggcagttaactgtagtttcaacgagagttttaatggcttttattattagtgggataacacaggcgagaaacaggaggaacctaatgataaaggtaactgtccctaccagccttttaaatcctcctaaatgaaagaaccaccctcctaggaggtttgttgggccacatcccttccaggtttagactggtacatgggctacttttctcatgtttgaagtgatttctagaacaacttttctgttatcatctatgttaagacagcaattaggatattaaacttaccacagattccaccctttcctgctaataagtagcctagtgctggcctgttttgataaattgctgtgcgcatttgattttgttgttgtgtgaacatttccaaggctgagaccgtttggttagtgattatctttagaacagcctgtaattattctatttagcatatatatgggagtgcgataacctcatgaaccatcctctgcctaaatggcagggccataatattcgatgatccattgcagaggccactcgtcttcttgcacagggactccaagggtgtcacctgctgttaatgttttggaggaaggagtagccttggagatgagcttgaccctggtgtgatggatccagtgggggagttcttggactctcactacagttggcatgctgagtatgacagtgtaagggcctgtccactttggttgtaccttttggtgagggctgggttggcagataaacatgtctatgcctgcaaggcagttatgttgagaggacaaggaggtgctgacagggagaggcatggcctcatttgctgcttcacgaatgaaagactgtgttggattaagtaggggaggtaattcctgagtggctcggagtctggtaaggatggaggccttaagacaaaagtatggctatgtatgattttgaagggagtataaaaagagggtgcttttggtgttgtgtggagtctcatgagggtgaaagggagatttcttgtccacaactgacaggtttctagagctagcttggtgagttgggttttaaggacagagttgactttttaaactttgcctgaagattgaggcctgtagggtgtatggggaacctatttgattcttaaggatgtagagacaccttgggtaatttggctgataaaggtgagcctgttatcatactggatggatgttgggagtccgaaacggggaattatatgcatgatgagagtttgtgtgatgacatttgcaccttctgaagttgttgggaatgcttctacctacccggagaaagtacagacaaagactggaagatagcggagccgtttatcgggcagcatgtgagtgaagtttacttgccaatcttgcctgggtaccttgccctgggcttggtgggtaggaaaaggtggtggccagggtaagccttggggtgacactaagtggcatatagagcaggacagggtgattccttgaacacagcaggaaagatgaggacaagtgagaatagggtggagaaattgagggagaagtttgtaactgacatggaaagagttgtggagactttggaggatagggattgtttgagattgaggaaggatgaagcacccttccttgacataccatggtccttgcttttgaaggtttttggcctggaagtcctctttttctttggaggagtgaaaaggagggaatgaggacagggacagagcatggctgggtttagatgcgagctgttagcacagtgatgtggggagtttctatgaatagagcatacagttggaggagcagtggggcagagatgagacttagtacactggggtgagctagcatgtctttgatgttatgggttgaataaactgttaggttggcatggagagatagttttaggctttcaagggtgagaacagcagctgccgtcaaggctcagagacaggcaggtcatccaagaactgtggcttcaagctgtttagagagttaggcaacatcctggagggtgggtcccttatactgggttagaacacctagtgcaactctacgctgttcgtcggtatagagggagaaaggtttggtaaggtctgcgtctgggagaacgaggataggggctgagttgagagccttttggagtagacagaaaggttgggtaataggctgtgcagggtttaaaggctcatggagagggcctttagtggcttggtataacggattggcaagtagagcgaaggaggaaacctagagactaaaatatcccgctagtcctagaaaagagaatttcttgctagtttgtggaggcgggagggactggaggagggatatgtggttggttgtgagccttcggtttcgtggggtaagagctaggcctagataggtgactgagggggtgcatatttgagttttaggggagacctgatacccccattctgccaagaagtttaaaagaaagatagtatgggcgttgcagtctctttgagaggggctacacaagagcagatcattagcatattgaaggggagtggatggtgttaggaataaggtacagaggttgcaagccagggcctgcccaaaaaggtggggactgtctctgaaaccctgaggttactacttcaagggtaggtgggcacagcctggtgggcttacctgagggggcatggcctggtgggcttatctgggtatgcaccaggtgaaaggtgggtgtcggggttttcctacgtaaaggcaaagaggtcctgagaatcagggtgtgaaggaattgtgaaaaaaagcattatttagtttaggacagaaaaatgggtgatattgtagggaaccacggaaagtaaagtgtatgggttagaaactactggacatactgggagtacagcttggttaataagcctagggcctggactaagtgataagttccatgtagctttttaacaggtagaatcagtgtgaaaaggggagtttgttgggcagagtaggtgattggcgaggaggcgagaaatgatagggtttaggcctacaagagctgcttgggggttggatactgcttctgtgataggaactgggtggggtttttaagggtaatgtgaacgggggcgtggtgttctgtcactgagggtgtggaagtatcctaaacagtgaggttaactatggatggggaataaggaaaggctgcatgttttaaggtgggaggttggaggagaagaagaaaattagaagcccccgaggggtctgggtagatgcgttgggtactatggggaatgtggaggtggagagtagtgtggagttttgagaggatgtctctactttggaggggagttgggcatgagggcaggactaagaaagagtgagtaaggaaaaggtgtgcagggaccagaaaagtggaggagtggctcatggtttggacacttgtccatcaattcctacaacagactgggaggactgggaaattaggtaaagcagagtaggttgccccagtattaattttaaaaaacatactggcctacctgccaccatcagtgttacccttggctcagatgaagatatggtagttgctgggatgccctttccagggcaccatcagtcttcagcagcaaggctggtgagatccaagtaggaggttttggctggctcaggaagggatgagggcagtgcttctgggggacgctcacagtctgacttccagtggagtcctccatagagggggcacgaactggtgggcttacctgggtttgggcattgtctggaccagtggccttcattgccacacttgaaatgtgcaggtgcaggtggattcctaggggcttccatgtggagctgtggccccatgggcctgcagggcccctgatggcggaggcaagcatttgaaactctgcctgtttttgccttttactttcctcatcatgattgttaaagactttgaaggctaaattaagatctttttgtggggtttgtgggctgttaccaagcttctggcttctgaagcttgtgctgaatatcaggggtggattgggaaatgaactgaaggtttaaaatagtggttccttctgagctggttgagtctacgttgttatattttctcatggcttcaggtaaacaagagggagaaaaagggctgggttttcatcaggacattgggtgatttctgaaagtttttcatagttgactgctttatgggcaccttttgagtcctgcaaggagacacacaatcatgtggtcttgatagtggcatccagggtccctgtcttgataatcctagtgggggtcctggttggggactgcctctgtaccagtagctgggcaagagcctggtgattaattgtattagcatgtgcctgagctagggtccagatagtctcagtcttctggggtgagagttgaagagaggataatgtagaggtcatgccaagttagttcataagactgggtaaggtactgaaattccctaaaataagaggtagggtcttttggaaatgaaccaaatcttttgttaatttgagagagatcagtgagggagaagggagcatgaactctcacaataccttcagctcctgctacttcccaaagggggcactctagcaccgacactgaagtaagggtggggcatgggccaaagatggcacctgagtgagtatggatgggagagaaggaagaagtcggaagtggttcctactgaccatttgaagggagaaggggggttgagttgataggcagtggaggatagataggggtgtaaggtggttggatgggtttacaggcctcaagagagggcggtgggggaggagactgggtacaggcaatactagaattgtcctgaggaggggacgatgtaggaaaagaagtggatactgctgactgggaagatggcagctgagaatataaagaggaggcttggggggttatagaagacagttgagagggagaggtaggggctgtgaggggtggacagcagtctgctggatccagtaagaaaaaagacgtagggttgggaggagaaaggtgatcaggtcggtgagaatggagaagtatttgaacaagtgagcaagaattgcagaggtcttgttgtgatctgagtgcaaaaaggcctggacataaggcatttctgcccatttttccagcagtcagcaataattgctttaatcagttaaaattgtaaagtcgaatgttccatttgtgggccatttggacccattatccaattcataatgtggccagactgaattgcaaaaaaagacaaggtgcttagggcagatatcttgcctgaggcctaaggtttgcaggttttttacaaggcagcctagaaggctgtccttcagaatggaaaactgggaattttctataatggagggtaggcactagagaacagagaaaaggagaccgtcctggatagccggatggagacaataaaaggagcagttgtcatcactgcctttttcattcctggaacgggatcagatggcttagaggggttcccctaaggccagatgatcagctagtgcctgacacatgccagagccttcttggaccaacattggatttttggacacaagaaccaagagaggccatacagatttttccctgttaagcgggctcccacagaaagctaccagtaggtgagatcactgactgatgtgcatgtacagagaggcaactggaggctgaggagcttcttttgtccagctgctgtggcctgctctccagggcagaggggtaggtccatggggatgcagacatcagctctcctgggttttggcaccaaaatgtaaggttcttgtattggtttgaaccctgagagcacactaacagacaacatgaggcagtgtggagacacatggtgttttaatgagtgcctggttgcaggcgggctgaggcctaaaatggccccagcaccaaataaggatgggtcagggatttcatggtctcctgtaaatcagaagtggcccagtctgacatggctgctatatagtacctggacggcctctttcttgatcttcaggagtacgtgtcttctggccagggtgggtgtcttctggccatctctctttctactactgctatcttgctggtgcacactgctgatgcaagtagccttgtaccttgggactgggcctgagaagggagttactcatcccttcaagctttcaggccccggggagaatctatcagtcaagagttctagaccagcctggacaacatggtgaaacccgtctctactaaaaatacaaacattagtggggcgtggtggcaagagcctctaatcccagctacttaagaggctgaggcacaagaattccttgaacccgggaggtggaggttgcagtgagctgagatcctgccatcacactccagcctatgtgaaagagccagactcattctcaaaaaaaaaaaaaaaagaaaaaagaaaaaaaaaaggtaagcatcttaaaatttcctttgtttatttaaacactgtgagtaatttcactggatttttcaaacacttagtttcaaacacgaagtgaataactctgacatggaaattaaagcttgaacctagtgattccaagctaagactaatactaagcctacaacaggaggtttttgttgttgttattgttgtttttgagacagagattcgctcttgttgcccaggctggagtacaatggcacgatcttggctcactgcaccttccggttcaagtgattctcctacctcagcctcaagagtaactgggattacaggcatgtgccatcacacccagctaatttggtatgtttagtacagacggggtttctccatgttagtcaggctggtgtccaactcacaacctcaggtaatttgcctgcctcagcctcccaaagtgctgggattacaggcctgagccaccgcgcctggctaacagtaagttattaaaggcctactgtttttttctggggagcctcccctgcagatgtcccagcctgcgcatcctagcaatggaaggagcctttatcctgagagaagctacagagtcctggaaagctggggccccacagcttgatgcagttaagatgaagacgaaaggaaactgggaggttctaactgataatgaagttattgttttgaggcattttttagactttgtaaaataacaacgtcagatttatgttaaaaaaaaaaaacgaattccaaaatgtattgcaacaggaggaagtatcaactaactataaggcctttatggcttgcaaaaatgtaggcagaaaagggctttctttcctagggaggagcaaacaatattggaaaggaggtgggaggggaatggcaaatggagggtgaaaaagtcagattttagatcagagaatgtcataccctgaaatcagcatgttcttagtagggacataaaatggggttgtatgttgacacagactgagagtagctcaaagttcaggagcctgagggagaaagataaacttaagtaaagtttgattaagaaatattttattttaggctgagctcaatggctcacgcctgtaatcctagcactttgagaggcagaggcaggtggatcacctgaagtcaggagttcaagacctggctaacatggtgaaaccctgtgtctaccaaaaatacaaaaattagctgggtgtcattgcagtcatctgtaatgccagctacttgggaggctgaggaaggagaattgcttgaacccagaaggcagaagttgaagtgagccgaggttgagccactgcactcctgcctgggtgacacagcgagactccatctcaaaaaaaaaagaaaagaaaagaaaagaaaatgcttatttaagtgggatggcatttattaaccagaaagttctgaaaaaaattattaggagataccagctctctacggtgctgaatgaagtctacttaaaattactactaaggtgattccgttccaagatggccaaatagggacagctctggtctacagctcccagtgtgattgacacagaagatgggtgatttctgcatttctaactgaggtacctggttcatctcattgggactggttggacagtgggtgcagcccatggaggcagagccaaagcagagtggggcattgcctcacccagaagcacaaggggtcaggtgatttccctttcctagccaaggaaagccatactttcaccaaagacagtgcctgaaaaaataggaaacttccacccaaatactgtgcttttccaatggtcctagcaaatggcacacaaagagattatatcccatgactttcttggtgggtcccatgcccacagacccttgttcactgctagtgcagcagtctgagatcaacctgcaaggcagcagcctggcagggggaggggcgtctgccactgctgaggcttgagtaggtaaacaaagcagtcaggaagcttgaactgggcggagtccaccacagctcagcaaggcctctgtctctgtagactccatctctgggggcagggcatagctaaaccaaaggcagcaaaaacttctgcagacttaaacatccctgtctgacagctctaaggagagcagtggttctcccagcacagtgtttgagcttggagaacatacagactgcctcctcaagtgggtcactaacccccgtgtagcttaactgggagacatctcccagtaggggctgactgacagctcatacagccaggtacccctctgggatgaagcttccagaggaaggatcaggcagcaacatttgctgttctgcaatatttgctgttctgcagcctccactggtgatacccaggcaaacagggtctggagtggacctccagcaaactccagtagacctgcagctgagggagctgactgttagaaggaaaactaacaaacagaaagaaatagcatcaacgttaacaaaaaggacatccacaccaaatcccatatgtaggtcaccaacatcaaacaccaaaagtagattaagccaaaaagatggggagaaaccagatcagaaaagctgaaaattctaaaaaccagagtgcctcttctcctccaaaggatcgcagctcctcgccagcaatggaacaaagctggatagagaatgactttgaagagctgacagaagtaggcttcagaatattggtagtaacaaacttctctgagctaaaggaggatgtttgaacctatcacaaggaagctcaataccttgaaaaaagattagacaaatggctatctagaataaacagtgtaggaaggagcttaagtgacctgatggagctgaaaaccatggcacaagaactacatgacacatgcacaagcttcaatagctgattcaatcaagtggaagaatgggtatcagtgattgaagatcaaattaattaaataaagtgagaagagaagtttagagaaaaaagagtaaaaagaaatgaacaaagcctcccagaaatatgggactacgtgaaaagaccaattctacgtttgattcatgtacctgaaagtgacggggagaatggaacgaggtagaaaacactctccaggatattaaccaggagaacttccccaacctatcaaggcaggccaatattcaaattcaggaaatacagagaacaccacaaagatactcctcaagaagagcaaccccaagacacaaaattgtcaggttcaccaaaattgaaatgaaggaaaaaatgctaagggcagccagagagaaaggtccggttacccacagactgaagcccaacagactaacagcagatctcttggcagaaatgcgacaagtcagaagagagtgggggccaatattcaacattcttaaagaaaataattttcaacccagaattcatatccagccaaactaagattcataagtgaaggagaaataaaatcctttacagacaagcaaatgctgagagattttgtctccaccaggcctgccttacaagagctcctgaaggaagcactaaacatggaaaggaaccaccagttccagccaccacaaaaacatgctaaattgtaaagaccattgatgctaggaagaaagcccatcaactaacaagcaaaataaccagctaacatcataatgacaggatcaaattcacacataacaatattaaccttaaatgtaaatgagctaaatgccccagttaaaagacacagactggcaaattggataaagagtcaagacccatctgtgtgctgtattcaggagactcatctcatgtgcagggacacacataggttcaaaacaaagggatggaggaagatctaccaagcaaatggaaaggaaaaaaaaaaaacagtggttgcaatcctggtctctgataaagcagactttaaaccaacaaagatcaaaagagacaaagaaggccattacctaatggtaaagggatcaattcagtaagaagagctaactatcctaaatatatatgcacccaatacaggagcacccagattcataaagccagtctttagagaagtacaaagagatttagactcccacacaataaaaatgggagactttttagacagatcaatgagacagaaggttaacaaggatatccaggacttaaactcagctctgcaccaagcagacctcacagacatctacagaactctccaccacaaatcaacagaatatacattcttctcagcaccccatcacacttattctaaaattgaccatatagttggaagtaaagcactcctcagcaaatgtaaaagaacagaaatcacaacaaacagtcttgcagaccacactgaaatcaaattagaactcaggattaagaaacttactcaaaactgcacaactacatggaaactgaacaacctgctcctgaatgactactgggtaaataacgaaatgaaggcagaaataaagatgttctttgaaaccaatgagaacaaagacacaatgtaccaaaatctctgggacacatttaaagcactgtgtagagggaaatttatagcactaaatgccaacaagaggaagcagcaaatatctaaaatcaacaccctaacatcacaatagaactagagaagcaagagcaatacgcattcaaaagctagcagaaggcaagaaataactaagatcagagcagaactgaaggagatagagacacaaaaaaccctttaaaaaatcaatgaatccaggagctggttttttgaaaagatcaacaagatggatagaccactagcaagactaataaagaagaaaagagagaataatcaaataggtgcaataaaaaatgatgaaggggatatcaccaccaatcctgcagaaatacaaactaccatcagagaatactataaacacctctatgcaaacaaacttgaaaatctagaagaaatgagtaaattcctggacacatacaccctcctaagattaaacaaggaagaagatgaatctctggatagaccaataacaggctctgaaattaaggcaataattaatagcttaccatctaaaaaaagtccaggaccagacagattcacagctggtttctatgaggaggagctggtaccattccttctgaaactattccaatcaatagaaaaaaaaggaatcctccctaactcattttatgaggccaacagcatcctgataccaaagcctggcagagacacaacaaaaaaaggagaattttagaccaatatcactgatgaacatcagtgcaaaaaacctcaataaaatactggcaaactgaatccagcagcacatcaaaaagcttatccaccacaatcatgttggtttcatccctggaatgcagggctggttcaacatacacaaatcaataaacataatccatcacatacacagaaccaaagacaaaaaaaccacatgattatctcaatagatgcagaaaaggcctttgacaaaattcaacaaccttcatgctaaaaactctcaataaactaggtattgatgtaacatatctcaaaataaaaagaggtatttatgacaaacccacagccaatatcatactgaatgggaaaaaagtggaagcattccctctgaaaacttgcacaagacagggatgcccactgtcaccacttctattcaacatagtgttggaagttctggccagggcaatcaggcaagagaaagaaataaaggtattcaattaggaaaagaggaagttaaactgtccctatttgcagatgacaaaattgtatatttagaaaatgccatcgtctcagcccaaaatctccttaagctgataatcagcttcagcaaagtctcaggatacaaaatcaatgtgcaaaaatcacaagcattcctatacaccaataacagacaatcagagagccaaatcatgagtgaactcccattcacaattgctagagagaatcaaatacttaggaatccaacttaaaagggatgtgaaggacctcttcaaggagatctacaaaccactgctcaatgaaataaaagaggacataaacaaatggaagatcattccatgctcattgataggaagaatcaatatcatgaaaatggccagactgcccaaggtaatttatagattcaatgccatccttatcaagctaccaatcattttcttcacagaattggaaaaaaactactttaaagtatatatggaaccaaaaaagaccccacattgccaagataatcctaagcaaaaagaacaaacatggaggcattatgctacctgactttatactatactacaaggctagagtaaccaaaacaccatggtactggtgacaaaacagatatatagaccattggaacagaacagaggcctcagaaataacaccacacatctacaactatctgatctttgacaaagctgacaaaaacaagatatggggaaaaaattccttatttaataaatagtgttgggaaaactggctagccatatgtagaaagttgaaactggatcccttccttacaccttacacaaaaactaactcaagatggattaacgacttaaatgttagacctaaaaccataaaaaccctagaaggaaacctaggcagtaccattcaggacataggcatgtgcaaggacttcatgactaaaacaccaaagcaatggcaacaaaggcaaaaatagagaaatgggatctaattaactaaagatcttctgcacagcaaaagaactaccatcagagtgaagaggcaactttcagaatgaaaaaaaatttttgcaatgtacccatctgacaaagagctagtatccagaatctacaaagaacttaaacatatttagaagaaaaaaaacctcattaaaattgggcaaataatatgaacagacacttctcaaaagaagacattcatgcagccaacagacatatgaaaaaaatggtcatcattaccggtcattagataaatgcaaatcaaaaccacagtgagataccatctcacaacagttagaatggcgatcattaaaaagtcaggagacaacagatgctggagaggttgtggagaaataggaatgattttagactgttggtggaagtgtaaactagttcaaccattgtggaagacaatgtggtgattcctcaaggatctagaacaagaaataccatttgacccagtgatcccattactgggtatatacccaaaggattataaatcatgctactataaagacacgtgcacatgtatgtttattgcagcactattcacaatagcaaagacttggaaccaactcaaatatccatcaatgatagactggattaagaaaatgtggcacatatacaccatggaatactatgcagccataaaaaatgagttcatgtcctctgcagggacatagatgcagctggaaaccatcattctgagcaaactgtcacaagaacagaaaaccaaacaccacatgttctcactcataggtgggaattgaacaatgagaacagttagacacagggtggggaacatcacaccctggggtctgtcatggggtggggtgcagggggagggatagcattaggagaaatacctaatgtaaatgatgagttaatgggtgcagcaaaccaacatggcacatgtatacctatgtaacaaacctgcacattgtgcacatgtaccctagaacttaaagtataataataaaaaataaaaaaaagtactactaaaaattatggaacataggagttatctgtacattgaagtttgcataaaacatgtttctttaaggttaaattcagattttatttactttgtgttggaggaatatttcaacagtgatgctgtgttcttctgtgtgcattagcacatcataaaaatttgtccagtgcagttaatggttaatgattcacttgcttaaatagctctctgacagattttttcactcttcagttaattatttttctcttcattattaagtatctttatgcagctgatgtgtataaaacgctatacttaatctggcagctgcccttttttcttattttttcttcatatttttctttggaaaatgaaggcttttatctttgtttacaggtgagaaaaacttggaaaacccaggcttttccacttactggatgtgttacaaaatatccttcttgggccaaaaacatagacagtattgctgagcttgttagaaattaaaaaaatcagactttatgtcggatcttctggaaaaaaaaaaaaagaaaaaaacctgtataacaaggtcttgaacttattgtacatatcaaaatttcagaggtgtcttgtagctcaatatgtctttttccatctgaaaaatatgcacaactcattcagtatgatgtaaatatagcactgaaaagtgtgtatgttgatgttcatgctcttaattttatactttgttagctacaataacatcatatatgaactgatgtggatcttatgctgttctttttttctcagagttaaaaaatacattagagaatatttctttgttggagattattttcttggataatttaattctataagtaagaaccagttccttttactttccaatttcaccttcagtcaaaataaaaactctgcccatggccacttggtaaaaatgtgtgtgtgtgagtgtgtgtttgtttcaggggccattgcaatttagagatgtgcttacagaattatctctggaggagtggcattgcctggatactttacagcaaaatttacatagcgatgtggtgttagagaacaacataaacctggtctttcttggtgaggataactttaatacataattcataatatactctaaaggttttctttctcttttttgtggaatgttttttagtaatgtattcattgatcaaagagtttcagaacccattttccagaaaatctttagaaatttttcatttagaaaagaatttgttcaagatgttttgtgttaatcaaaactttacacattcctgagttgagctatattcttcactctaaattagtgataattccagaaatttggtggcataaaatattgttgtccccacctgaaaatctaattatcagcaacaagttttgattctgtagtaccaggtagtaaaattaaaaaacctacaagtaggctgggcgcggtggcttatgcctataatcccagcacttcaggaggctgaggcaggaagatcatgagatcaggaattcgagaccagtctgaccaacatggagaaattccatttctaataaaaatacacaattagccgggcatggtggcacatgaatgaaatcccagctaccctggagactgaggcaggagaattggttgaacccagaaggcagaggtttcactgagccaagatcgtgccattgcacttcaacctgggcaataagggggaaactctgtctcaaaaagaaaagaaaagaaaagaaaaactgatgaattcaaagtgttttctgggagccaagatggccaaataggaacagctccagtctacagctctcagcatgagtgacacagaacacgggtgatttctgcatttccaactgaggtaccaggttcatctcactggggagtgccagagagtgggtgcaggatactgggtgcactgcaccgtgtgtgagccaaagcagggtaaggcatcccctcacccaggaagtgcaaggggtcagggaatttcctttcctagtcaaagaaaggggtgacagacagcacctggaaaatcgggtcactcccaccctaatactgtgcttttccaatgagcttaacaaacggcacaccaggagattatatcccacacatggctcagagggtcctacgcccatggagccttgctcattgctggcacagcagtctgagatcaaactgcaaggcagcagagaggctgggggaggtacgcccaccattgctcaggcttgagtaggtaaacaaagctgccagaagcttgaactgggtggagcccacctcagctcaaggaggcctgcctgcctctgtaggctccacctctgggggcagggcacagacaaaagaccgcagtaacctctgcagacttaaatgtctttgtctgacagctttaaagagagtagtggttctcccagcacgccgcttgagatctgagaatgggcagactgcctcctgaagtgggtccctgacccctgagtagcctaactgggaggcatctcccagtaggggtggactgacacctcacatggccgggtactcctctgagacaaaacttccagaggaacaatcaggcagaagcatttgtggttcaccaatatccactgttctgcaaccactgctgctgatacccaggcaaacagggtctggagtggacgtccagtaaactccaacagacctgcagctgagggtcctgactgttagaaggaaaactaacaaacagaaaggacatccacaccaaaaacccatctgtacgtcaccatcatcaaagaccaaaggtagataaaatcacaaagatggggaaaaaacagagcagaaaaactggaaactctaaaaatcagagtgcctctcctcctccaaaggaacgcagctcctcatcagcaatggaacaaagctgagcggagaatgactttgacgagttgagagatcaaggcttcagaagatcaaactactccaagctaaaggaggaagttcgaaccaatggcaaagaagttaaaaaatttgaaaaaagaattagactaatggataactagaataacccatgcagagaagtccttaaaggacctgatggatctgaaaaccatggcatgagaactacgtgatgaatgcacaagcctcagtaaccgatgcgatcaactggaagaaagggtgtcagtgatggaagacgaaatgaatgaaatgaagcatgaagagaagtccttaaaggacctgatggatctgaaaaccatggcacgagaactacgtgatgaatgcacaagcctcagtaaccgatgcgatcaactggaagaaagggtgtcagtgatggaagacgaaatgaatgaaatgaagcatgaagagaagtttagagaaaaaagaataaaaggaaatgaacaaagcccctaagaaatatgggactatgtggaaagaccaaatctatgtctaattggtgtacctgaaagtgacggggagaatggaaccaagttggaaaacactctgcaggatattatacaggagaacttccccaatctagcaaggcaggccaacattcaaattcaggaaatacagagaacgccacaaagatactccttgagaagagcaattccaagacacataattgtcagattcaccaaagttgaaatgatggaaaaaatgttaagggcatcccaagagaaaggtgggttacccacaaaaagaagcccatcagactaacagctgatctctctgcagaaactctgcaagccagaagagagtgggggccaatattcaacattcttaaagaaaagaattttcaacccagaatttcatatccagccaaactaagtttcataagtgaaggagaaataaaatactttacagacaagcaaatgctgagagattttgtcaccaccaggcctgccctaaaagagctcctgaaggaagcactaaacatggaaaggaacaaccagtaccagccactgcaaaaacatgccgaattataaagatcatcaagactaggaagaaactgcatcaactaatgagcaaaataaccagctaacatcataatgacaggatcaaattcacacataacaatactaatcttaaatgcaaatgggctaaatgctccaattaaaaggcacagactgacaaattggataaagagtcaagacccatcagtgtgctgtattgaggaaacccatctcatgtgcagagacacacatgggcttaaaataaagggatggaggaagatctgccaagcaaatggaaaacaaaaaaaggaaggggttgcaatcctagtctctgataaaacaggctttaaaccaacaaagatcaaaagagacaaagaaggccattacataatggtaaagggatcaattcaacaagaagaactaactgtcctaaatatatgtgcacccaatataggagcacccagattcataaagcaagtccttagtgacctgcaaagtgacttagactcccacacaataataatgggagactttaacaccccactgtcaacattagacagatcaacgagacagaaagttaacaaggatatccaggaattgaacacagctctgcaccaggcagacctaatagacatctacagaactctccaccccacatcaacagaatatacattcttttcagcaccacaccacacctattccaaaattgaccacatagttctatggaagtaaagcactcctcagcaaatgtaaaagaacagaaattataacaaactgtctctcagaccacggtgcaatcaaactagagctcaggattaagaaactcactcaaaaccgctcaactacatggaaactgaacaacctgctcctgaatgactactggctacataacgaaatgaaggcagaaataaagatgttctttgaaaccaacgagaacaaagacacaacataccagaatctctgggacacattcaaagcagtgtgtagagggaaatttatagcactaaatgcccacaagagaaagcaggaaagatctaaaattgacaccctaacatcacaattaaaagaactagagaagcaagagcaaacacattcaaaagctagcagaacgcaagaaataactaagatcagagcagaaccgaaggagatagagacacaaaaaaatccttcaaaaaaatcaatgaatcccagagctggttttttgaaaagatcaacaaaattgattgaccgctagcaagactaataaagaagaaaagagagaagaatcaaatagacgcaataaaaaatgacaaaggggatatcaccactgatcccacagaaatacaaactatcatcagagaatactataaacacctctatgcaaataaactagaaaatctagaagaaatggataaattcctggacacatactctctcccaagactaaatcaggaagaagttgaatctctgaatagaccaataacaggctctgaaattaaggcaataatcaatagcttaccaaccaaaaaaagtccagaaccagatggattcacagctgaattctaccagaggtacaaggaggaactggtaccattccttctgaaactattccaatcaatagaaaaagagggaatcctcccaaactcattttatgaggccagcatcatcctgttacaaaatcctggcagagacacaacaaaaaaagagaattttagaccagtattcttgaacattgatgcaaaaatcctcaataaaatactggcaaactgaatccagcagcacatcaaaaagcttatcctccatgatcaagtgggcttcatccctgggatgcaaggctggttcaacatatgaaaatcaacaaacgtaatccagcatataaacagaaccaaagacaaaaaccacatgattatctcaatagatacagaaaaggcctttgacaaaattcaacaatgcctcatgctaaaaactctcaataaattaggtattgatgggacgtatctcaaaataataagaggtatttatgacaaacccaaagccaacatcatactggatggacaaaaactggaagcattccctttgaaaacttgcacaagacaaggatgccctctgtcaccactcctattcaacatagtgttggaagttctggccagggcactcaggcaggagaaggaaataaagggcattcaattaggaaaagaggaagtcaaattgtccttgtttgcagatgacatgactgtatatttagaaaaccccatagtctcaccccaaaatctccttaaactgataagcaacttcagcaaagtctcaggatacaaaatcaatgtgcaaaaatcacaagcattcttatacaccaataacagtcaaacagagagccaaatcatgagtgaattcccattcacaattgcttcaaagagaataaaatacctaggaatccaccttacaagggatgtgaaggacctcttcaaggagcactacaaaccactgctcaatgaaataaaaagaggatacaaacaaatggaagaatattccatgctcatgggtaggaagaatcaatatcatgaaaatagccatactgcccaaggtaatttatagattcaatgccatccccatcaagctaccactgactttcttcacagaattggaaaaaactactttaaagttcatatggaaccaaaaaagagcccacattgccaattcaatcctaagccaaaagaacaaagctggagacattatgctacctgacttccaactatactacaaggctacagtaaccaaaacagcatggtactggtatcaaaacagagatatagaccattggaacagaacagagccctcagaaataatgctgcatatctacaactatctgatctttgacaaacctgacaaaaacaagcaatagggaaaggattccctatttaataaatggtgctggaaaaactggctagccatatgtagaaagctgaaactggatcctttccttacaccttatacaaaaattaattcaaggtggattaaagacttccacgttagacctaaaaccataaaaaccctagaagaaaacctaggcaataccattcatgacataggcatggacaaggatttcatgtctaaaacaccaaaagcaatggcaacaaaagccaaaattgacaaatgggatctaattaaactaaagagcttctgcacaacaaaagaaaccaccatcagagtggacaggcaacctaaagaatgggagaaattttttgcaacctactcatctgacaaagggctaatatccagaatctacaatgaactcaaacaaattcacaagaagaaaacaaaccccatcaacaagtgggcaaaggatatgaacagacacttctcaaaggaagacatttatgcagccaaaaaatacatgaaaaaatgctcatcatcactggccatcagagaaatgtaaatcaaaaccacagtgagataccatctcacgccagttagaatggcaatcattaaaaaggaaacaacaggtgctggagaggatgtggagaaataggaacacttttacactgttggttggacggtaaactagttcaaccattgtggaagtcagtgtgacaattcctcagggatctagaactagaaataccatttgacccagcaatcccattactgggtatatacccaaaggattataaatcatgctgctataaagacacaggcacacgtatgtttattgtggcactattcacaatagcaaggacttggaaccaactgaaatgtccatcaatgatggactggattaagaaaatgtggcacatatacaccatagaatactatgcagccataaaaaattatgagttcatgtgctttgtagggacacggatgaagctggaaactatcattctcagcaaactatcacaaggaccgaaaaccaaacactgcatgttctcactcataggtgggaattgaacaatgaggacacatggacataggaaggggaacatcacacactggggactgttgtggggtgggggaagggaggagggatagcattaggagatatacctaatgctaaatgacaagctaatgggtgcggcacaccaacatggcaaatgtatacatatgtaacaaacttgcaagttgtgtacatgtaccctaaaacttatagtataataataataacaataaaagtgttttctaaatatttagaaatttctgttttaacttagtatttttgtattaatttactagaatattttatcacaccctctcagctgagcacattactagcttgtaattggagaatatgagcaagattcatattatttatttatttatttttatttttttgagacagagtgtcactttgtcacccaggctagagtgcagtggtgcgatctgggctcactgtaagctccacctcccagattcatgccattctcctgcctcagcctcccgagtagctgggactacaggtgcctgccaccatgtgtggctgattttttgtattttttagtaggtacagggtttcactatgttagccaggatggtctcaatcttctgaccttgtgatccacccaccttggcctcccaaagtgctgggattagaggcgtgagccaccacacccggtctcatgttatttatttttaataaaacaggtattgttgtctccaagccagacctgatcatctgtctggagcaaggaaaaatcctttgagtatgaggagacatgagatgattgccaaacacccaggtgggtgcaagtgaaagtgaatacaacagacgacacaggtaagagatcccaaggtgaaagagaaagccagtacttaaaatgtgatttgggaagctgtgttccaaaggaaatagttcctgggcggttgttttataatttttctctcacaaagggacatctgctgtcttatgctttcaaattctctaaggattctacttttctttcagtgagcttccttcaagttcacagtgaaagccaaagtcttcttcatggcatataagacactgcacaatcttgctgcttttacattgttttgatgacacaaaattatctgcatgattttaagaaactaaaactattctcaaagttctctttttgcattttgaaatgtgcgagagtagtagtttctgttgaatttttttcattattctgcacatttccattctgtttttattactatatagtgttgaaatatagttggaaagtataagtatgatatccttctgctctgttcttttcatcaagattgctttggctaatcagtttattttagtttcatgtaaattttagaattgtatttttcattactgaaaaagacaccactgcaattttaataggaagtttattgaatctatagatcactttagataatatggaactctaataatatttattctttcaatccatagacataaaatactttataatttatttggaacttctctaatttctttcactgattttttttggtaaaggtttttcatttcattggttaatttttttctcagaaattatttaatgctataacaaataagatttttttgtcctatttttatcagatagtttgatttaagtgtataaaaccgtacatatacttgtatgttagtttcatattttgtaatttactgagtgtatttattagtttagataggatttaatgtactgtttattagtttttaaatataatattgtatgatctacaagcaaaaactttttagttttcttaaattttaatggatttttttttatttctttgagtaaatcttctgccacatacttccagtgttacactaaaatagaagcattcacaatgggcacaatatagttttgcattggtgtctgaatttgatggagcaaagacctattcaagttttcataaactgatttcagaaggtaaatatcttcttctgttggacccttagggtgatgagatgccctctgaatttgtagtgaagaagggttgtagcttggtcaccaggctgctgggtctgcattagggtccacctttagttggcttgttacaggggcttgggttgttataattcccattttatttttggacagactgaatatccttcagagctttgctccataaggcagacactagggcatgtttttgcaattggctctgcatatggtgggccttgtatcaggatgtggatgggtgtggctttcagtgagtaccagagagcatttcctcaggtaaccgtgtgggttactatataggcagaactgaccataaactgtggctcaggtaactgaaactgagtcatggaactgcctcagtgaccccagtaaaggccaaggtctgcatgcctggatgcatgactgtaaatgggcaccttcctccaagtctctggaatagcaggacctctgtcagactgtggctgggaggagtttgggatggttacagagtaagtttagaattctcaatggaaccaagttgggtgaaccctatcctggtctgtagctaaaacaggggtcctgtagtatcccacgtgagtgagggcctgccttctgaatagaacacttctcaaacataagctttaacagcatttcacaactgcatccctggatgtcaaatctctcttagaggtacttattttggagatggtgtcttgctacataacccaggctggtctcaaaatcctggcctgaactagttctccaaccttaacgtaccatgtagctgtcattacaggtgtaagccataatcctggttctctcataaaggcatttttgtcaggggtggctgactttttatgccataagggaatatgaaaatagggcacttttaatcttttcatcttactgatgtcactgtccttttacatttttactttttattttctatttcaaatttgtctataattttggattcagtcatttagcacatatgctagaatttgcatggtatacctgaagtaaatgagatattagtaggcaccccatatttactaaaatagttacttataaatttatgtttgctccgggcaaaaaggaattataggattttcgtctactattttcagcctatatctaaataataacatagttcatttcctaatatttgttttacatatcagaggatctaaccctattctacaaaatatatatatatttttctatatttaacaatggaaggttattatttgcttttaaagttggaatacagcagtttcattttgtgtaagaatagcatatatttaaaacaaaaagcaactctagtttcttttaaatgctaatttattaaaagtttgtcattggagtcttctatttataattatactgcatattttctgaaattttagtgccacacagtgcatgccaatgattcaaaatacaggtatatgatgattacatagtagcagttgaatatcacagttacctacacaatttttttttttttttttttttttttgagaaagagttacctctcttacccaggctggagtgcaatagtgtgatcttggctcactgcaaccttcatctcctgggttcaagcaattctcatgcctcagcctcccaagtagctgggattacagggatgtgccactatgcctggctaatttttgtatttttagtagattttgggtttcaccacattggctaggctgcttttaaactcctcacctcaggtaatctgcccccctctgcctcccaaagtgctgagattacaggcatgagccactgcacctgcctgacaatttttttttgatgatacatcaatgtggcataccagattttgtgagtaaatatttctcttattattgttttgaagttctgtgtatcaggggtcccgcccccaatatttcaatgtatgttctttctattttccataagtgtcagctggttgaaaaataaagagaaagagtacaaagagaggaattttacagctgggccaccaggggtgatatcacatatcggtaggaccacgatgcccacctgaaccttaaaaccagcaagtttttattaaggattttaaaaggggagggagtgtatgaacagggagtaggtcacgtgcttcaaggggcaaaaagcagaacaaagatcacatgcttctaaaacaggaccagagcaaaatcagaactcctgataagggtctatgttcagcagtgcacgtattgtcttaataaacatcttaacagaaaaaaagggttcgagagcagagaactggtctgaccaaaaatttaccagggtgtagtttcccaatcctagtaatcctgagggtactgcgggagaccagggcatatctcagtcattatctcaaccacataggacagacattcccagagtggccattcatagacctccccccaggaatgaattcctttcccagagtattaatatcagtattccttgctaggaaaagaatttagtgatatcttccctacttgcacacccatttataggctctctgcaagaagaaaaatatggctctttttgcccaaccccacaggcagtcagaccttatggttgtcttcccttgttccctaaaaatcgctgttattctgttttcaaggtgcactgattgcatattgttcaaacatacatgttttacaatcaatttgtacagttaacacaattatcatactggtcctgaggtgatgtacatcctcagctaatgaagataacaggattaagagattaaaataaagacaggcataagaaattatgaacatattatttgggaagtgatagatgtccatattaaaatgaaatcttcacaatttatgttcctctgctgcgactccagctggtccctctgtttggcatccctgacttcccacaatatctctccctttctttttatataaatgtaccaacatcgcatgcaatgttcaagagtcactagctgatctccaagccaaagtatagattgtcttaaatcattaatttgattagataatttttgatcaatgccttgttgagaattccacatttggttggaatttgcttgccaaagattaacaaaatgggccgtttgaatagattggtgtaatgccactccggcagtagtggccagtgcagtgactataaataggcccatgatcacagtgattaaagtgaaaacaaatctcttagattttttgagaattctttgtaacacttcattcattaaatgtactgagagggaagattcccagtgtctgggtaaagttaccgaatccagattccttctcgagctcgaagccacattacacttctcctggagtcaaaatgggagttaacacaagtgtataaatgacaattaatgcattggacagtttgtgtgtccaaattttgatatttcccactaacagcacgtaaggaggcttaacacaactttgtataggaatagtcaggctggaggtaaacaaagcagaacattgatactgagggagagtagaggtggtggcaacgcccaatgttgtctgccataaagaagcaatccgaggtgcccagggatgctgaggaagtagaggggcatacctgggtcaagaagaattatcataatgccaattggagtcccataaaggaggatcagcatcaaaaagaggaaaagggttcaaaggggatttatcatggggttcagagtcatggatgcaaggggcagtagtggggataacagacagaaaagtttacccttcccatactcacagtccagacatggcaatagccaatttccaaagttctgagtgttccaggctcagaatggggaatatcatatgaggcctcggaggggtaatgcccttatcttcccattttaagggaaagaatgagctgaacttcctatgtaaagtagaacgatgatcctcgtcctcccaataagaaataaaataagtagcctccaggcattcccttccaccagaggagcaattgttttttaaatagccctttggtgcccatcctattactaaaccatatgcgtcattttttagtactactacatgtgagttaacacagtcttcccaaattaaaattttagatgggccctcaaaatttttaggacatggttttcctacaggtttatattgaaagtttggggtatctcctattactccccctttcatttgtcttaaaggagaaagagagaggctggagatcaaatgtccctgttctcttgtagctaatctctccggaagataagcagcccagatttgagcttgtagatgaatacaaccatctacatgtgcatgtccaaggcacagaggagggtatttataacccatggtaacattaaattcagtgctttcttctcctggttgagtggggcaatggtcatctgtagctccatgtatccacacactatcattagtatagatttctgcaggagcattcatccaggtgagaggtcgaataagtggaagaaaaggcacataagcccaataagaataattttgtgtagcaggtaaatcattttgaggggaaactgatgagacagaaagtttaagaagaattattaaataaaacctattgtaagcaagatcctgtgctgaaggaggaagagaagaacagagggatgttattttcaggctaatagaaatggtgagatttttaggtttagaagtggcattaattagaggggtctccgttgccattagggaggattgaaccagacccattttgatttggcatgccagtttttgagaagtcggcagagatctcaccaggtatgaaggcggtctctgacttggatgtcttttccctgtggctttctttgtcactattcacacgaagtttgagtctctcagtgggcacccagacaggggattgatctcctggtgaaacacaagcataccctcttccccatgttataattgttccaggttcccaggtattggtttgggagtttttccgtaacactggcttgccttcatttagggagaattttttgcctgtataatggcattcagctgcagtcagagttgtctttaggaacatttagaaagtttaaagtaaacaatgctaaatgtaattgggagtggggagtggttaaattatgcttttgttgctcagactgtttggacaattgagtttttaaagtgcaattggcctgttccaccacagtctgtccctgaggattgtaagggattccggtagtatgggaaattccccttgttgcataaataaatcaaaagacttacatatccaggggtgttgtctgtttttatctgacatggaagccccataactacaaagcaagaatacttatgtcttttaacatgggcagtgccttcccctgtttggcaagtagcccagataaagcctgaaaagatgtctacagaaacatgcatatatgaaagtctgccaaaggagctaacatgagtcacatgcatttgccataagtcattaggagttaggcctctgggattaatgccagattcctgatttggaagtacaaaaacttggcactgagggcagcagtggataataagcttagcctctttccaggtgagagcaaatttatattttaatccagtagcattgacatgagtgagattatggaactctgagcttcttggtttgcaaaagagaccggtcaaccttttgattaccagcaggcatgggtcccagtaaagtggtatgagatctgatatgtgtagtatagaaagggtgtctacactggcgaaccacctgttgtaaacttgaaaataaaaaaagccaattcagaattatcaatatgtttgatagtagcgatttctatatttttagtggcatgtacaacataaacagaatcagagacaatatttaacagtttggggaaatcctgtaaggcaataattacagcaattaactctgccttttgagcagatgtgtgaggcgtagaaataagcttgtctgcaggacacagataaccagcatttccgttactggagccatcagtgaacactgtaacagcctcaggaatgggctgatctttggtctattgagggaccacccaataagtcatttttataaaatcaaacaatttttttgataatgattgacaataacacagataaaatcagtcaagtgaatttgccacagtatggaatgttgaaaagcagcctgaactttaagccgatttaaaggaaccacaatagatttggatcaaatccagaaattttaagtgatctacaccaagcttgtccaattagattggctatttggtccagataaacagacaaagtttttgacacagaatgaggaagaaaacaccactccactaaatcattatgttgaacaattagcccagtaggggagtgcaatgaagcaaaaaccagaagctgaaaaggctgagatggctgtaccctagacaacagggcagtttggattctttcttccatgaattaccgttccagtgaagcctcaggggtcaaagtcctgagactgtggagattggaatctccacacagtatagaaaacaagttagacagtgcatattttggaatgcctaaggtagatcttaaataattaatgttacccaaaagtttttggaaatcatttaaggttttcaaagaatctctcttaatctgaactttttgaggttgaatatattctttattgaccaccattcctaaatattgagcaggagtggtcttttgaattttatcttgagtgatgtgtaatccagcctcagtgacatggtggctcaaaaattgataacagtcaattaattctttatcagtgggggcagcaattaatatatcatcaatataatgaagaatataggcctggggaaattgagctcacactggtgaaagcacccatccaacataaagctggcagatggtagggctattcagcattccctgaggaagtactctccattgataatgagctacaggctcctgattattgatagatggtacagtaaaggcaaatttttcacaatccaatttatgtaaagcaataaaaatactttaagatcaataactatgagaggaaattcttaggtattaaagcaggggcaggcatgccaggttggatggctcccataggtttaattacagcattaatggaccttaaatcagttaccatccaccacttgcctgatttcttttttactagaaacacaggagaactccagggggaaagagaagattccacatttccaagttgtaactgttcagaaaccaattgagttgaagcctccagttttttttagagagtggccactgatcaatccaaacaggtgttttagattttcattgtaaaggaataggattaggaggcatggcagtggccgccattaaaaaggagaacctaaaccagcgctgtcttcttttacagtaacttgaagaggtttagcaattccttcatgttttggactgaaaccgagtctgggaacaaaccccatgttttccattatatgttgactgggagcactataagagttatgctgaatattaatttcagctcccccttgtgccaacaaatctctaccccaaagattaatggggattggcatgatataaggctgaattgcacccttttgaccatcagggccaatgcaaggcaagataaatgtgctctggtgaacttcatcagcttttccaacacctactagtcccatgttagtgggatgtttaagtcaagaggaaggccataaattagaggaaatattagaaatgtcagccccagtatctactaggccctcaaacttttttccttgaaggcgtatggtgcaggtgggccattgtttagaaattacgttaatcaaataagtggctttttcaccaccagagcccatcccagggccccgtgtcttatctcctttgtttaaacaatattaggtagtgaaagtaattgagcaattgactcactggccggaatggaaacaggaaccttggcagacaccataagtttaatctcatcagaggaatcagaattaatgagacaagtatgaactatgatacctttagcagaggtggataccctacatcctacataacaccaggcccaccgaaccttgagataaagggccagtgacccctctggggacaattaaaggcaaagaattaggtagtaaatttagaggaatggtaatacagagatcgacccccctgacccctactgtggaggtagacaagcactgtactgagatagaagaagaggatgggacccatctgggttggctgtaggtaaatttgtttgtgctgggggctacgttgggaccacttgaagtggaaatgcaacattggtctgagtctgaggtgtcccatttgatattggggtctgggactggccccacttcccatttccctggttctgtggcaagggatttgcatctatatcagacttagaggggcaagtacttgcccagtgtttatctttagacaacatgggcaaacagtagtaggagaatttgactgtgtttgttgagccagcttggctgcttttaagtttttaacaggctccaagaaaagaataagttgagacagtttgactgccatccttcatggcctgtgcccacagaatagctttgtgggtctctgatccaatgccttcccaagctttaatatatgcaggcaacacctcatgatcaggaaaattttgtctttggatggaacacatggcaattttacattcatggttcacattctcaaaagctaacatatgaaggagaataccttgagcatgctcatgagagacagatttttcaacagcatcttgtaatttagccaaaaaaatgagggtataattctgaccttgtttaacactagtaaatgaaacaggagcttggcctggggtgtgtaatttatcccaaactctcatacacaacttcgttacttgttccatggtgagagcatcaaagcctaattgaacgctagtgtcagagtaattatcagagcctgtgagctgagcctgagtaattagaatgccatcagcccaatttagttgagcctgcagacgggcctcctctgaccaccaggtacagaattgtaaatgctgagatgcagttagaacagcttttgccaaaaagtcccagtctaaaagaagcaaaatgacctcagtacaaagagtctgtaataccattttaacatatggagaactaggaccatactgaataaagagatccttgaattcttttaaaaaggtaagattgagcagtgcataccaaagcacttgtaccccttgagcatcaggaggttccagcatgaccggataagcctacatctctaatccacttgtttctttgttctggtgtaataagtgttgcattaaagtttcaagaacaggcacatgagacggagttggcatagaagtgacaggaaaagtatgtgcagataagagaaactgaggttgaggaggtcagactggtatgagagtgtgagaaaggggcattgggggagcacaagaggcagaagcatactggtgattattgtcccagtcctgtgcaactagagtggcaggagtgtccttgcatgaagaagcgtatagagaagcaggctgagtggatggcaaagtgactgattgagggaccaaaatgacaggagggtgaggagctgtggtggatgggggagggcctacagaattacaggtaaattatagtttggtcctggagccattaggggtctccggaggcaaagcctgcaaacgtttgaagagggaagagttagcatagatatggtcctggctgtccaagttggggccacgggagctacaagtaccggctcttcatgaaaagaaataagatcatcaggggagatgttaagccaaagtcactggagttagatattgaattctcaacattgtcaggtcagggaggagtaggcaaagggagaggctgagcagataatgaaggccgagtgggagaggaaagctgaggaagaggtagagggttgccagatttagaaaattgtggtaactgcaggggacacgggattggtatgtcattaggacaccaggtaccaagtcccaatcaccccaaacagtgatggcaacataatttcctgtcaggaccagttcccagaattttgcaccaacatgatcccatagttccacatctaacgttcccttttcaggaaaccaaggacagtattcttccactgccctgaatagggtgaccatattttccttgggcaccagaactccaccaagttttaacaggagtttaatatagcagagataagcaaaatgtttagactccatgtgacccatagttaccgcagacaatacacagacaactcaccaatcgtcagggagtcaaacaagcatttctgtggactggaccaatgaacattcctccacacctaccaaagggaatcaggttcccacatgcacttaggaaaaagaaaacaacattggcacaccagttattggggaaaaccacccccaatacttcaacatatgttctttctattttccataagtgtcggccggctgagaaataaagagaaagagtacaaagagaggaattttacagctgggacaccaggggtgacatcatatatcagtaggaccgtgatgcccacctgagccttaaaaccagcaagtttttattaaggattttaaaaggagagggggtgtatgaacagggagtaggtcgcatgcttcaaggggcaaaaagcagaacaaagatcacatgtttctaagggaacaggacaagggcaaaatcagaactcctgataagggtctatgttctgtagtgcatgtattttcttgataaacatcttaacagaaaacaggatttgagagcagagaaccggtctgaccaaaaatttaccagggtgtagtttcccaatcctagtaatcctgagggtactgtgggagatcagagcatatctcagtccttatctcaactgcataggacagacattcccaaagaggccatttatagacctccccccaggaatgaattcctttcccagagtattaatatcagtattccttgctaggaaaagaatttagtgatatcttccctacttgcacatccgtttataggctctctgcaagaagaaaaatatggctctttttgcccaaccccacaggcagtcagaccttatggttgtctttccttgttccctaaaaaccacgttattctgttctttttcaaggtgcactgattgcatattgttcaaacacacatgttttacaatcaatttgtactgttaacacaattatcatactggtcctggggtgatgtacagcctcagctaatgaagataacaggattaagagattaaaataaagctaggcataagaaattatggaggtattatttgggaagtgataaatgtccatattaaaatgaaatcttcacagtttatgttcctgtgctgcaactccagccggtccctccatttggggtccctgacttcccccaacgctatgttagtgagttttttcagggtaggttacttttttttttgttttgagataaagtctcgctctgtcacccaggctaaagtttactggcacaatctcaaatcactgcaacctctgccttccgagttcaacccattcttctgcctcagcctccaaagtagctgagaatacagatgcatgcaagcccagctaatttgtgcattattattgtagcaggacaagctgcagacaaaacccttcagacaccaagttagagaagaaagggctttattcggccaggagctttggcaagactcacgtctccaacaactgagctccccaagtgaggaattcctgtcccttttaagggcttgcaactctaatggggtccatgtgagagggctgtgatcaattgagcaagcaggggtatgtgactggaggctgcatgcactggtgattagaatggaacagaataggacagggatcttcacagtgcttttcttgtacaaataactgattaggtcagggttgtctgcttatggatttcatttctgctttttagtttttactgctttctttggaggcagaaattgggcataagacaatatgaggggtggtctcctccctattccccccctttgagaatctcagtagtgggagttctcactttcattctggctacccgtgtcttcttacaaggcagatcgatagtgattcaaatagtacacttgtgctgaaacattttggtgaactaaggtagcagtgaagctttttatcatttgaaaaagtacaggtagcaaacaagggagcagtaagcaggttcctattactattataactcttattataacagttttaaatgctcctagcactggaaaccattttctaaacttggcaccaggatcaaatccatgccacatttgcacaggcacatgtgccagttttgtcatatctctaactatgtcttcaattacttgcccttggtcatctatgtgtagacctcaattagtaaggttaaatttcccacagacccctccttcagctgctagtaagtagtcgagagccaatctatcttgataggtaggatttctcatctgagtttcttgccaggccagaatagtcaaggctctgccagttttattagtggttatttctaagacagcttgtaaccatatcatttggttgagcatgtaaatggggttgtagtatccccacgagccgtattgtgcccaagtagcaggcccataatattgtgtgattctctcagggagccattcatcatcttgccaattccctatggctatgcttctcttttcatgagaagcatagacagggaagccaggagttcacctgtctttatgggcaataggaagaaagattgtttaatagtgccaataacacaactacctgcccactggttgggtaatttggcataagctctatgcccacatatccagtataatccagtgggggctgtccagtcctggtgggactctgggtgggtctacacggtttgcaactttgggaatttactaaatggattcctttctgtgtgatttgaactgtaccaagtgactgtttttgtggtaccattatacaatttatgtcccagacaaataagttgtcctatgggatgagtgaattattttccttctctagctatgcaatattgtccaataattgaggcttttagggcccagaaattatcagggtgattcttttgagccaggaattcaacaggaactgggtctataggtactaatccttgggcttcccatggccaatgatctcccattacagttcctccacacacataacatgaagtgttattgagagactgggctatgtgctcagataattgcaaaaacaaatttcttgtttttctgggaatttttggtactggtacatttagttcatcataggaagtttgaaacactgtctcaggagagcgtttgtaaacttctcctcaaactaagatatttacttgaggatcccatccagacccgtcaattcctaaggtcacacactcctcttttttccagtgaggatcaaggggatttgttattactagctctgtggggttacattttcccttaatacaggaaaggctattttttccttcctgaaagtggactggatccttttcattttttatccaagttgcccaagtgacacaagaccaatatccacattcattgccacacaatcctaattcatgacaaatgtactttttttcagtcatatagcctttttcccaactaaaagagcgaccttgccttcctaacttattgctattaatgacagcactggcatcaaatctcaagattatgcgtttgggcacccctttttattctgttgtggtcaatactttacttgtatcatttatgagtccccaccagacttcagtccttaatctttgttaaaaaactgtggacatgggaggctcagaacggtcataacacacatctggccagtcttttcctgggctacataccttgtactgagtgccattatataagcatgttccttttaaagtccctagacattcatagtaactatagaacagaaagattgttttaacttgttgccctacctcggtaacctgatgtatacactgagagcagtcctccatgtggggaaaatcagtggaagtttttactatacaagcccaaattataaggaagatgagtcccacgatgatcctcctcatgctttggccgtgcatagaccagtcagcttctgggtgtgactggagcagggcttgtcgtcctcctcagagtcactttgtagggggtgtccgggctcggttttgcctcccaggtttcagcggctgcaggtttcacacagctgtggtggatccaggctgggattccttctacctttacagctgtgggggtggtcaggatgacggtctgaggtcctttccaccgtggcctcaaaggggctatgttgcagtctttgatccaaatgcaatcacctggagagaaaaggtgaactggggagaataagctgatgggacatctctcatttacccaagttgagattgtttgtgtaatttttcctaaagcctgtagctgtcactgtaattcaatttcacctaactctcagggaatgcctggaagcccccatagtataggaggaggtctatgatacagtatttcataaggggagtatcctgttttcttagaaggagtgcatctaattttaaacaataccataggaagggcctgtatccactttaatcctgcttcctgacatactttccctaaactatttttaatagtccgaatcattggctcgacctttccggaactctgaggtcggtaggtggcatgtagcttccaagtgattcctaatgcctttgctgtcttctgtaccaagtcagccacaaacactggcccattatctgagccgattcataagggcagtccaaacctaggaataagatctcagagaagcacacaggttaccttgggggccttttcagttctttttggataagcctccacccacccagagtaagtacacacaggaaccagcaaatacttgttacctgcacatttctgtgaaatccacctgaggatcctgaaaaggagctgctacataagcttgtatgccaggcagaacagtgagacattgcctcatattgtgctgtcggcaagtaacgcactgtttggtactgctttggcaagggctgggaagcgtgagatgtagaagtaccagcctaacaatttttcaaatgactcttgacctagatgagtggtttcatgcatggccaatacaattgtggctcccagcaactgcagcacagctactctcccatctggcagtctgatccatcctccttttattacttgcccccttctgtgtggaagaagtctttttctttcttaggtaggtaccaggtcaggtatttgagggagtaagggggctgctactgatgcctagtatggggtagatgctgcttttcgagcttctgagtcagctcgggagtttcctaaggccactgaggtggagcctcactggtattccctgcagtgcatgactgccaccttctgaggtttccacactgcctccaataattgtagaatttcttgttgatattttatgtcctttcccccagagtttaacaggcccttttccttatataatgctccatgcacttggagggttagaaaggcatgtctagagtcaatgtagatatttacagtcttaccttcactgagttctagagctcgagttaaagcagtgagctcagccttctgggctgaagtgccctgtggcaatggtttggtttcaatgacagcatccaaagttaccaccgcatattctgcacatctttctccttgtgggttgatgaagctactcccgtccaaatataactccaagtctactgatgcccatggctggtccctaaggtcaggtctgctagaataaactgagtccaacacctctacacagttatgctcgactgggctctctgatactgggagcagggtggtgggatttagggtgttacagacttcaatgtttatgtggggattttcacatagcaagctttggtacttggttaatctagcatttgttagccaatggtgtcctttggtgttcatcaaagttaccacagcatgggggcttttatattcagatttggcccaagggttagtttatctgcttcttgtgctaacagggctgttgctgccagggcccttacacatggtggccagcctttggagaccccatctagttgttttgagagataggccactggccttggccaggaccccacagtctgggttaaaactccaactgccattgtttctctttctgacacatagagtgcaaaaggctttgtcaaatctggtagtcccagggctgggaccaatgtaagtttttcctttaacttacaaaaggcttgctgttgtagaggcccccattcaaaaggctcccagttgcccccctttgtaatgccgtacaaaggtttggctagcactgcaaagtttggaatccataatgtgcaaaaccccacagctcccaggaattcccttacttgccttctggttttaggttccggtaggctgcagatgacctgctttctttctgaccacaggctgtgctcccctttccaaatagtgaatcccaggtagcgtacctgctgtctgcagatctgagatttcttcttgggcaccttatacccacagtcctccaggtgctgaaacagggcatcaacccttttgagcacccaactgccatggagtgtcccagcagaaggtcatccacgtacaggagcaagacatagcttaggtctttagcaggaaacttttgcaagtctcaagtcagagcctccccgaagatagtaagggagttcttgaacccttggggaagccagttccaagtgtactgagtagtgacacctgactgtagatcttcccaccgaaacgcaaacagcttctggctctcaggagctattctgatgctacagatggcatcttttaagtccagatgggtaaaccagatgtcctcagccggcagcagccctaacaacgtgtaagggttaggaactgttgggtgcagagtcactgtagcttggttgaccaagcgcaagtcctgtactggttggtagtccttggtccctggcttagggactggcaggaggggggtgttccatggacactggcaaagaactataattccataggctttgaagcacctgagatgaacccggattccttcgagagcttccctgggaagggatactgctttcatctaatcagttgggcccaggcttaacttctatgagtatgggggcttggttggccgccagtcctggaggattatcctctgtccattctcaagaccaacgctcagctagagctggttgtatctcttcccattcttcttcccaggggactgtaaggacaatgataactcctgttcccagtaactttagctgtaaagagccgtgttttgtaaaggagatggtggctgtcagcttgctaagcaagtctcttcccagcaagggcaaggaacagccaggcatgtacaagaactggtgaactacttcatgtcttgccaccgagtaggtccgtggcagacagtaagtctacttagtagaaactcctgttgctcggattatatcaatggttttcttggacaagggggtgaccggggtggtcaataccaaatgttcaacacctgtatcaaccaaaaacttaatatctttgcccccaattgtaatcctgaccgtgggctccttgggggtgattgagcccagtccccttcagtccaatagcccttcagccagattgaataaagctccctcatctttatctgaggtcttttgttctgaatcatgttgcttttccttcagttggggacacttatttttccaatgtcccattttcttacaataggcgcattggttacattgcaagcgtgggtgattagacagggtattattcccagaacccccctttccctctccttttgggggaattcccctgatggccacagccagtaagttggcgtttcgcctggcctggctttcaccttccttacggctttctctgtggcttgttgcatctctattcaaacacttgattggctatttccagtaactgtgagatattcatacacttaagcccagcctgtttctgcagttttctcctgatatcttccacgctttgactaactaaggccatgttgatcatgtgctgattttcagggctatctggatcaaaatgagtgtacatactgtaagcctcacaccgtctttcatagaattgcgctggactctcctctttttcttggatgacctcagagatcttatttacacttgtagccttttaagcccctttctttagaccttctattcatgcatcatggtactgtcttagcctctccatgtctggtcactagttcaggtcccattgggggtctgttcctggcagctgaattcttatatattcttggggattttggtaatccactgggatgtgctcctctggccacttagttgccacccggagcacccttagcctttcatcaaagaggtacatgaacagctggtggcaatcagcccaagtaggattatgagtgtgtataatagtttggagcaagtcaattaaagcttgaggcttttcagtgtaagcagcagtattatttttccaattgatgaggtcagcagaggtgaaaggttgatacacaaagtcacgcctttccaccatgtgtccatcctcatctaccccagtatatcactgctgtctcaggggcatttggattccagtcttgggccgtaagtgagctgccaagggaggagtttctcccgtggcttcacttcctcttttgtctactctgggtggtctaggagtgtggctatctggtggaggtgtgggtgctgtgggctcaggagtgggaagcccttcctcttgcaattctgaccatgattcttctggtattgggtcagacagggcttttggtgccggcttccctcagcaggtggagtgagaaccttccttaactaactgtccctttgctactagtactgctgctgcctgtcctcttaactactgtggggggtccaaaactagctctaaccgagaatctttatacaggaactgatcggggtgccctggcttgtaggttacactgtgccataccttcaatacaagggacctgttcaggcttccttctgatggccaacccacctttaatgctggccagtctaactcacacaaagttctaagttttcttggtgtcatagtaactccatagtctcccttaaatccctttttgaaatttttcaacatagctcctagtggggtgggcctactttgtgcctgacccatgtttcctcgagacaaaacactgcgcttacaccacatgcacaccacaaaacaaaaacaggtaaaaagggcacacacacactttttcagtttacaccaaaccagaatcagaaccaaaatcagagtatcaagaaatccaagccaggtcaaaaccaaaacctaagtatcaagcaattcaactcaactcaaaaacaaaaaacctaagtgctggtatgggcacgtcatgggtgatcaggccacgcttccactcaaatggagtaggcaagttccaaagactagtcttaccaagtttcagatgtctggattccaagtgccagttccttcctgatgttcagccactgcagtgatcctccatgggggcctgccacacactgctctggtgaggcattccactggcgcagttgcctacccgggagcactctcaggatccgcgttgctcaagctggccagagtcccctgcagggatgcttcacagggcaggcctaagctgcctaagtggctgtctcaatggtcctttaatcacctgcttcccagtcagggaaccaagaaatgtagcaggacaagctgcagacaaaacccctcagacaccaagttaaagaaggaagggctttattaggccgggagctttggcaagactcacatctccaacaaccaagctccccaagtgagcaattcctgtcccttttaaggggtcacaactctaagggggtctgcatgagagggtcatgatcaattgaacaagcagggggtacatgactgggggctgcatgcactggtaattagaacagaacagaacaagacagggatcttcacagtgcttttcttatacaaataaccaattaggtcaggggtcgatctttaactaccaggcccaggttttggtgccaggctgtctgcttgtggatttcatttctgccttttagtttttacttcttctttctttggaagcagaaattgggcataagataatatgaggggtggtctcctcccttattattagagaccacatttcaccatattggccaggctggtcttgaactcctgtcctcggtgatctgcctgccttggcctcctaaagtgctgggagcacagtcttaagccaccgagcccagcctcagtgtaggtttcttaacatcagtttattgtgtttattgggtttacttacgtattataaatttagacaattttcaattctgcttgtactctttaagtcaacttgagtttcaactgaaaaataaataatgcatgtgtatcccaatcagattacatgtgtatgcattgtcacacatgtccatgtgaagagaccaccatacaggctttgtgtgagcaataaagctttttaatcacctgggtgcaggctggctgagtccgaaaagagagtcagcaaagggagataggggtggggccattttgtaggatttgggtaggtaatggaaaattacagtcaaagggggttgttctctggtgggcaggggtgggggtcacaaggtgctcagtgggggagctgctgagccaggagaaggaatttcacaaggtaatctcattagttaaggcagaaacaggccattttcacttcttttgtgattcttcagttacttcaggccatctgggtgtatatgtgcaggtcacagggtatatgatcgcttagcttcagctcagaggcctgagattcttgtcttcttatattaataagaaaaataacataaaatagtgttgaagtgttggggcagtgaaaattttggtggggtggtatggagagataatgggggatgtttctcagggccgcttcaagcaggattaggggtggcgtgggaacctagagtgggagatattaagctgaaagaagattttgtagtaagggcaatattgtggggctattaaaaagagcatttgtcatatagaatgattggtgatggcctggatgcagttttgtatgaattgagaaactaaaccaaagacacaaggtctgaataagagaaggagcaaaacaggtattaaaggactaagaattgggaggacccaggacatccaattagagagggtccaagggggttcagagtaattacttgtttggttggtgagttttggggctctattcttgacagagtcctttttgttaagttggaggctgagcttgctgaggtatgttctgaaaagaccattaatccattctacctttcctgaagattgaggacagtaaggggtatgaggtttcaatgaataccaagagcctgagaaactgcttgggtgatttgactagtaaaggctagtccattattagactgtatagaggtgggaaggccaaactgaggaattatgtctgacagaagggaagaaataacaatggtggccttctcagaccctgtcgggaaggcctctacccatccagtgaaagtgtccacccataccaaggagtgttttcatttcctgactcggggcatgtgagtaaagtcactttgccagtcctgggcaggggtaaatccccgagcttgatgtgtagggaagggagtgggcttgaataatccctgaggagtagtagaatagtagatggaacactgagaagtgatttccttggggatagatttccatgatggaaaggaaatgagaggttctaagaggcagtctagtggcttgtaacctacatggaagaagttatgaaatgactacagaatggaatgggtctgtgaggctggaatgagatattttccttggtccaagaatcatttgccttgtgtgggaagagattgataggtgaaagtttcagtgggggagtaggtgggagtgaccagataagaaggagaaaaactgccatgagggatagaagttggaatgctagctgctttttagctaccttatcagcataagcattgtcctaagtgatgggatctgatgccttttgatggctggttttttagctaccttatcagcataagcattgtcttaagcgatggggtctgatgccttttggtggcctttgcagtgaatgactccatcttcctttggaagtaaagccgccttgacaagagtttttattaaagaggcattaataatggaggacacttgtatagtgagaaaacatttttcagcctatataacagcatgggggtgcaggatatggaaagcatgtttagagtcagtataaatattgatgcatagtccctttgcaagattgagggcctgagttaaggcaacaagtttggcttgctgagaggtagcacagaggggcagagcggtagcctcaatgatagacatggaagatactatagcatagcctgcctttgctggtgagtggcaattaggcctggtggaactgccatcaataaaccaagtgtgatcagggttaggaacaggaaagaaggaaatatgaggaaatggagtgaatgtcaggtggatcagagcgatacagtcatgtgggccagttgtggtatcaggaataatgtgggggccagcctaaaacagtaaggtcaagttgtttggacagaaaggctacacagtgcagtcccagctcttgtgtaagaattttgaccacacagccctgtacttcggctgcatgtaatgaaaagggttgcgatgagttaaggagagctagtgtgggagtagcttctagggctgcttttaaggaatggaaagaggagtggtgaaaggatttaggatctgtggggtcagctaggtttgctttttgagtttatacaatggtttagtcaggatggtaaaactagatatccaaaggcagaagtacctaaccatgactaggagggaaaggagttgttgttttctagaaggggttggggtttgggagattagctggacacaatcggtagggagagcacatgtgttttcatgaagaattatgccgagataggtaatggatgagaaagaaatttgggcttgactgaggtaatgggagctgtctgtgaagccttgcagcagtacagcccaggtaatttgctgagcctaatgggtgtcagcatcagtccaagtgaaagagaagagaggctgggatgaagggtgcgaagaaatagtaaagaaagcatgtttgagattcagaacagactaatgggttatggaggggttgtggagggaggtattgaggataggaaagtatatggttttgacaccaatgggtggataggcaagacaattggttgataaggtacagatcctgaaataacctgtaagtcttgtctgggttttggacaggtaaaatgggggaattgtaaggagagtttataggctttaaaaggccatgctgtaacaggcaggtgataacgggctttaatcctttggggtaagggtgattaggttttaatgggatggtaagaggtgcatgaattgtcaccaaggagggagtagaggtgtcctatacttgtggattaaaatggggagatacaaggggaggatgtgaaggaggctttgaactggggaaaaggatggcaatgaggtgtggctgtagcctaggaatagtcagggaagcagataatttagttaaaatgtcttgacctaataagggagctgggcaggtggggataactaaaaaggagtgcgtaaaagaatgtggtccaagctggcatcagagttggggagttttaagaggtttagaagcctggctgtcaatatccacaacagttatggaggcaagagaaacacgcccttgaaaagaaggtaatgtggggtgggtagcctccgtattgattaagaagggtatggactcactttccactgtaagagttacctaaagcatctgtgatggtccaggaggcttctgaggtgattaggcagtgtcagtcttcagccgctaagccaagaatatctgggaaggagtcagtcagagagccttgggctagagttccaggggctctaggagtggctgccaggcgagctggacagtctgattcccagtggggtcccgcacagatgggacatggcttaggaggaatcctgggctgcaggcattccttggcccagtggccagatttctggcacttgaagcaagatcctgagggaggcggtcctgtaggaatgcctgaccactgtggcttaggcattttgaagttcttgtgtgctggaggtgtggctgggttttgtctcatagcagaggcaagtaatttttactcttctctattattgtacaccttgaaggcaaggttaattaagtcctattgtggggtttgagggcaagaatctaatttttggagcttttctaatgttgggagtgggttgggtaataaaatacatattgagaataagacggccttctgccctttctgggtctagggcggtaaaccatctaaagttgttgccaaatgggccatgaactgggttgagtttctatatttgatgaaaaagagcctaaatgctaactgatttgggaaaggtcagataaagaaaaaggagtgttaaccttggctatggcttcagctccagccacctttttaagaggaaattgttgggcaagtgggagagggctagtcatggaatgaaactgtaagccagaccgggtgtgaggaggggaggtgataaaaggattatagggtgggggaacggaggctgatgaagaactgggacctggcttggcctggcgaggagcagcttggggaggagaggacaggtgggtctgtagaaaaggaagattgaaaagactcagtgatgcttggggttgggactgaagggacaggtgggagggaaagaaggaggatttgtgatgagtcgcattgggaacagagattagggagggaccaatgtgtaaaagaatgcctggacatcaggcatctcacaccatttgtcttttttgacaaaaatcatccaggtcttgtaaaatggaggaatcaaaagtgccattttctggctatttagaaccattatagagtttgtattggggccaagtggtgttgcagaagaaaataagatgcttaggttttaggtcaggtgagagttgaagaggttttaagtttttaagaacacaggctaagggagaagatgcaggaatggaggtcagaatgttgcccatagtgaaggatgtaagtttaaggagaaaggtagagacatggagaagagggtggtgagcagccctgggctgcaatatgggtgagcatccaaagcaggtgtccccgcaattaacttgccaccaagggaatgtgggtgaatgaccaaggcagatgtccccacggtgatcagacgccaatgaaatgtgggtgaataatcaggcaggcatccccacagtgattaaacaccaagggaaaactgtcttcctgagtctaagactggcaccggagttttgggtccacggataaaatgtgtctcctttgtctgtactagagaggaaaaagaactggagttggaaggacagggagattgaagggtagcaagagaggctggagaagagagtgaaaagaccgcttacccgatttgaaattggtgagatgttccttggactggttggtctgaggacccgaggtcataggtagatttcctcacggagtgagggcggggacaggcctcccgaaggattacctctgtcctgggtttttggcaccaaatgtcatgcgtgtccatgtgaagagcccaccaaacaggcttcgtgtgaacaataaagctttttaattacctgggtgcaggcaggctgagtccaaaaagagagcgaagggaaataggggtggggccattttataagatttgggtaggtaatggaaaattaccgtcaaagggggttgttctctggtgggcaggggcgggggtcacaagatgctcagtgggggagcttctgagccagaaggaatttcacaaggtaatgtcatcagttaaggcaggaacaggccattttcacttcttttgtgattcttcagttacttcaggccatctggatgtatacatgcaagtcacagtggatatgatcgcttagcttgggctcagaggcctgacatgcgtgtttatctataaatacgatgccaattttacttatggcttatctcatattctttgttagctgattttcgatggtagttttatcttgtctaagtgagtagtcgtggagatagtcattatcacgatgtgtttaatgatgaatatatattttctttttgtgagagaaacacttttgtgatttgaagttaatttttaaaaagatttaccattctgtatttttgtcagtttttccttgaaaacgttgttttaaaaacacataacataaaatttaccatcttaaatttattgaagtgtatatttcacagccagctgtggttgtggctctcatctgtaatcccagaattttgggaggtcaagacaggaggatatctggagctgaaaagtttgagaccagcctggggaatacatggagacccctctccataaaaaaaaacttaatagtagccaggtatggtggtgtgcagctgtggtcccagctacatgggagattgaggaggagtcaaaattgtgcctctacactccagcttgggtgacagagtgagaccctgtctcaaaaaaaaaaaaaaaaaaatgctgttcacttcaggcatgttaagtatattcacattgttgtgcaaaagatttctagaaactttacatattgcaaaactaaaactcagtaaccattaagtaacaacatctcattttaccctctctccagcttttggcagacaaaacttccactttttgtttttatgattttgactacttaagatatctcatataagtggaatcatacggtatccataattttgttactggattaattcaactgacataatattctcaatgttcatcttaaaatgtgacaagattgttctttttaaggtggaataatattccatcgcatgtatatgttacattttttgatacgtttataaatcaaggaacatctaggttgcttcagacttttggcttttgtgaatactggtataataaagatgaattttcaaatatgcctcccaggtccagtgttgcattttttttttttttttttttcccgcagacggagtattgctttgtcgcctaggctggagtgcagtggtgtgatcttggttaactgcaacttctgcctcctgggttcaatcgattctcctgcttcagcctttcgagtagctgggattatagatacccaccaccacacccagctaattttttgtacttttagtagagatggggccaggctggtctcaaactcctgacctcaggtgatctgccccctcagcctcctaaattactaggattataggcttgagccactgtgcctggccttcgttacatattttggatatagatttataaatgaggaacatttataatttttaaaataatggctgcatctttgttttccaccaacattcaatatggatttcatttttattgtatcatcaacagatttggtgttttaaaaaaatttatcatggccatattaatgggtatgaggtgattttgtttgtcattgtggtttttttttcatttctttacaaattagtaattttatgtgtcctttcaaatgctttttctcatttgtgtacttttctaatgaaaatgttgtttgtccgtttctaaatcaagttattcaaccttattttttagttttaagagttgtttatatattttgaatattaacttctttcatgtttaatttgcaaatgttttcacctattttctaagggatgtcattactcttgaattgttttttggtatgaagaaattttgaagcctattgtagttaaaacttttctgttatttcatttgctgctcatgtatttaattttgtatctaagaaaatggtgccaaggccaatgtcatgtctttttcctgtagtttttctaaaagatttgttagtttttttatgtctcagcattttatttaaaatatatttttgtatcattctaggaaataatccaacttaattttatcagtgctgatattcagttttcaacatcatttttttgaagagattatttctattttgtgctcatggcaacttcgtggaagatcatttgatcatatacagaaggattcatttctgagctctctattctgttctttcatctgttcatctttgtttctgtatcacattgtttatattctttagcttttaactgtaggttgtattgacatctttgaaaaataacattttttgacccctgagcaagaatatgttgatgaagagtgtgtttcatattcacaaggttttgaatttgccagtttgacttttgcttttaattcctagtttcattcagcttttgttggaaaacacacagtgtataattttagtgtttttaaagtgatttgttgttgttgttttgagacaagatcttactgtcaccaggctgcaatgctgtggcataactttggctcactgtagcctcagtctcctgggcttgaatgatgctttcacctcacttttctgagtggctaggactacagtcatgcactaccatgtctggctaattgtttgcttctttgtagtgttaggatctcactatgttgcccaggctggtctcatacttctggcaccaatggatcctcttaccttggtctctcaaagtgttaggattataggcaagagccactgcacccagtcagtattttaaaatttaataaaacttgctatgtgtcctaacggaatacaccagatgcaaatagaaatattgcatattatcttggttttgactggagagttttgtgtgtgtctgtgaagcctagttggtctataatatggtttggatgtccatgttctccaaacctcatgctgcaaaataaatcctcaatgttggttgtgagacctggtgggacatgtttttgtatgagggcatatttctcatgaatggcttggtacatcctcttggtaaacaaaaagtttacactccattaattcaaatgagagctggttcattaaaagaacctggcttcttcacctcacacttgctctgtctcttaccatataatatgtccagttactttttaccttctaccatgattttaagcttcttgatatcctcaccagaagcagatgctgacacacacttcttatacagtctgccaaactgtgagccaaataaacattttcctttataaattatgcactcccatgtgttcctctatatgcaaaataactaatatagtctataatgttgtctcagttttctgtttcttattttttatctgaattctctatttatttcttcaaatggggccttgatgtctgcaattattatgtcgctatgtatgtcttgcttcacttttgtcaatatttgctttatatattttaaagcccttatgttatttacacatatacatatagatagataaatactataaattcctgctaaatcaactcactttaccataatataatatcaatcattgtctcatggtagtacttaaagcatattctgcccaatataattatgaccacctcactcacttgtggttactatattcatggaatatacatttttttattctgttactttcagcctatttgactcaatgattaaattagtctcttgtaggcagcatactgtatgctttataaaaaaccactcaggcattctatatctttttctttatataattttatatatatatatatacacacacacacatatatatatatacacaagtgtatgtatatatatatatgtgtgtgtgtatgtatatttttttccagatggagtttcactcttgttgcttagactggagtgcaatggtgtgaccccagttcactgcaacctctgcctctcaggttcaagcaattttcctgcctcagcctcccaagtaggtgggagtacaggcgcctgcaaccacacccaggtaattttttctattttaagtagaaatggggtttgaccatgatggccaggctggtcttgaattcctgatctcaggtggtctacctgcctcggcatcacaaagtgctggtattacaggcatgagccaccacatccagccttgtgtattttggagatagtgtctcactctgtcaaccaggctgatttgctcggttcactgctgcctgaatctcccaaactcagatgatcctctcatatcagcctctcaagtagctgcattacaagtatgtaacatcacacccagccaacttttttttttgtattctttgtcgagacagattattgccatgttgccgattctggtcttgaactcctgggatcaagtgatcagcctatcttggccttccaaagtcctgagattatatttcattttattaagtagtttaatacgtttaaatttaaaatgattccttaaagaaatgaagttgttatttccagatatattgttattgtttcatgtgtttctagtagtatatttttctcatttccttttttactctctttaattttgtactggcatgctttgattattttttgttttattttagatactttctttaaacagaatctttgcaatcatcttgaaaactgtagattacatacatcttacagttaaagcaatatattttaatctcatgacaacttcaattgaatacaaaaactgtgcctctatattttccagtttgttgttgatttttttttattaaaatgtgcatcattcttttatttttatttatttattttttattgatcattcttgggtgtttctcgcagagggggatttggcagggtcataggacaacagcggagggaaggtcagcaaacaaacaagtgaacaaaggtctctggttttcctaggcagagtgtttgtgtccctgggtacttgagattggggagtggtgatgactctcaacgagcatgctgccttcaagcatctgtttaacaaagcacatcttgcaccgcccttaatccatttaaccctgagtggacacagcacatgtttcagagagcacagggttggggttaaggtcatagatcaacaggatcccaaggcagaagaacttttcttagtacagaacaaaatgaaatgtctcccatgtctactactttctacacagacacagcaaccatccgatttctcaatcttttccccaccttgcccccttttctattccacaaaaccgccgttgtcatcatggcccgttctcaatgagctgttgggtacctcctcccagacggggtggtggccgggcagaggggctcctcacttcccagtaggggcggctgggcagaggcgcccctcacctcctggacagggcagctggccaggcggggggctgagccccccacctccctcccggacggggcggctggccgggccgggggctgagccccccacctccctcccggatggggcggctggccgggcgggagggctgagcccccccacctccctcccagacggggcggctggccgggcggggggctgaccccccccacctccctcccggacggggcggctggccgggcagaggggctcctcacttcccagtaggggcggccgggcagaggcacccctcacctcccggatggggcagctgaccgggcggggggctgacccccccacctccctcccagacagggcggctggccgggcagggggctgacccccccacctccctcccggacggggcggctggccgggcggggggctgacccccccacctccctcccggacgtggcggctggccgggcggggggctgacccccccacctccctcccggacggggcggctggccgggcagaggggctcctcacttcccagtaggggcagccgggcagaggcgcccctcacctcctggacggggcggctggccgggcggggggctgagccccccacctccctcccggatggggcagctggccgggcggggggctgaccccccacctccctcccggacggggcagctggccgggcggggggctgaccccccacctccctcccggacggggcgactggcctgacgggggctgaccccccacctccctcctgggcggggtggctgccgggcggagacgctcctcacttcccagatggggtggcagccgggtggaggggctcctcacttctcagatggggcggttgccaggcggagggtctcctcacttctcagatggggcggccgggcagagacgctcctcacctcccagacggggtcgtggccgggccgaggtgctcctcacatcccagacggggcggcggggcagaggcgctccccacatctcagacgatgggcagccgggcagagatgctcctcacttcctagatgggatggcggccgggcagagaccctcctcactttccagactgggcagccaggcagaggggctcctcacatcccagatgatgggcggccaggcagagatgctcctcacttcccagacggggtggcggccgggcagaggctgcaatctctgcactttggggggccaaggcaggcggctgggaggtggaggttgtagcgagccgagatcacaccactgcactccagcctgggcaccattgagcactgagttaacgagactccgtctgcaatcctggcacctcaggatgctgaggctggcggatcactcgcggttaggagctggagactagcccggccaacacagcaaaaccccgtctccaccaaaaaaatacgaaaaccagtcaggcgtggcggcgcgcgcctgcaatcgcaggcactcggcaggctgaggcaggagaatcaggcagggaggttgcagtgagccgagatggcagcagcacagtccagctttggcttggcatgagagggagaccgtggaaaggggaggagagaggggagaggggagacgggagaggggagaggggaggggagaggggaggggagccggagtcactcttgttcgaacgcctccaacactatgactaagtaaaggagaatttctgttgttgattttaaaattattctatatggtgtatctattaacatttatgcggatttccatatttttatattctataaaagtactttaaaggttttgtgtaccatcattttgttagtttgttttgttttgttttgaatcgagtcttgccctattgcttaggacggagtgtatagatgtgatcttagctcactgaaacctcggcctcccaggttcaacaattatcctgcctctgcctccctagtagctgggattacagatgcctgccaccaagcctggctaatttcttgtattttttagtaaagataggctttcactatgttggacaggctggtcttgaactgctgacctcaggtgatccacctgcctcagcctctcaaagtgctgggcttacaggtgtgagccacagcacccagctggaaattactttttatctcactattcatagcatttcatatcaatacaaagattgacacatctagatataaatatacatagggagataaatactcacatagagaattctataaatatttctatctaaacatttatgtatacaaaacatgttccccaaaagacatttttaatcttttagcatgcactgaagatgctgatgtagaattacttcttttttcttttgctaaataacatgtcagaatggaacatagttatacaattttgtttatgtaaatatcaacaaagctctatcttcaaaggcaggccacagaaataagctgaaaagaaagtcatgtaacacatctgtccaggacagtatttcagcactctgcatgtctcctcattctgtgcatgttgtgttcacacctaccatttggggcctgtctcgacaaagccacagtcaccatttagataatttgataattgtatacacctgggctgagctacttggctggttgggatcacctgggctgtgcaaactggctgattgcaatcacctggtttctgctaatttgcttaatttatctcagcttcaggggtagaatacggagatgtcatctgacctactttatttctgaggttttttttaagggtcatatgcagaaataaacatttcatagacatacccatgtgactcattttgtgtgtatatgtttatcgagccacctattttgtatctatatgtacagaaagaagcctataaaataaacttgatctgaggctatttccattttctttacctacaggttaggtaaatcagtcagctactgagctcagtgaagatttattcaaaccaagccacacaccatattacattttttcataaatgtaaaaatatctttaataacctggaacctgggtgtttttaattctcatcccattaaaccagccccatgaggttctgttcgtctatctaggaactgccagaaatgcttgacatcagtgggctgagccttcctcacaaagcagatttgacctggcaaataagagccacctgtggcacttcagtgaatgttcactatcacccatttgaaatgtggccaagtaccatgtaccattatatttgcttccatcatcatcatcatctatcttctaaaaagagacctagacttctttttcattaccataaatacctgacttctgcctcaaagacaaaaagacaagagtgtgattttacatcacacactcttggaaataaatacagttcttgtcttgatgaaagttctaaagagaaagaataagtattctcatatttaggttaggacctttggactggggctggttcatctctgaccctacatacaacaataaaagaaaagtcaatcctgacatggcagtaaataactccaaaggccttagtaagtattcatcttccagaagcgcacaacaaagcccagtgcttcctttgaatatattaagtgcagcaggatgtatatcagagcattcctctatttctgtactattctagatatagtattctatagggaaaagatttttatacatgtatgaaaggtttttgtattactgtttgtagcaatagctatcaatacttccacattcaatgtctttattctgtatgaatatatataaagattgttccagcttcatatatatatacttatacatattaggtatgtatatgaatatacatacatggtagatacataaacacaaacatatgaatgtgtctttgtaaatattaatgtatacatataatattctcccactttttaaattatagagcgtatactaaggatgcaggtgtagaattaattgccttctgttttgctcagtagcatgtcagaataaaacatagccatacaatgttgtttatagaaacataaaggttcagcttcaggtttcaggccttgtaaagctgtgtggtatatactgtccaggtgagcaaataaggccctgcatttctttttggtgtgcatgggctatttacatttaccattttgggcatacctgaatgaatctgtagccactagttagataattagctgatcgggatcacctgggctgagctaattggctaattgaattcacctggactgatcagttggttgattggaatcacttgggctgagctaattcactgattgaaatcacctggactgagtgaatggtggttcaaaatcacctgtgctaaactaatgggctcatcagttgagctaactggctgattggtatcacctagaataagatagttggctgttagaaatcacctgggctaatcagccgggctgagctaatttgctgattggattctcctgggatgtgctaatgggctgcttggaatcccctaattggctgatttaaattatctaagctgagttaattgattcagaaaagttgaacactgagctgggccggtggctcatgtctgtaatcccagcaatttgggaggccgagtcaggcagatcatttgatgtcaggaatttgagaccagtctggccaatacagtgaaaccctatctctactaaaaatacataaattagccaggcttggttgtgggtgcctgtaataccaggtactggggaggctgaagcagcagaatcgctttaaccagggatgtggaggttgcagtgagccaagattgtgccattgcactccagcctgagcaagagtgaaactctgtctcaaaaaaagaaaaaatatctatctatctatctatctatctatctatctatctactgtcagaggatgataacttgaagtattttagagatgttaagaatctgaaattatttttacttttagtttttataaatgtttcttaagcatttttaatttccaaaaaacttgtaaataatgttgtcagtttaatttttctgaagaatttaaatagagtcaaattatacatatcaaaaaatctacttttctggtagtagatcagcttaattttcagaacaaatgtgttaaacttcacgagattttatgctgaccaatttgatcagtagcctctttcatacaactgggagagatgacaccaagatgtagcattcatgttgggtgagagactaaatgactaccagtagctagataatttctgttttactaataaatgtttattttcatttctatattgtctcaagttatgttaacaataaagtaataacctttatccaggaaattttgaaaacttattttttaatcagccataacagtaagcaaagacagagaaatgaaggtttttaccagtcataatttatatattaaaattaaaatacttctagaaataaagaaggaaaggaagaaagaaatatacaaacaaatgaaaagcagcctggtcaacatggtgaaagcctgcctctactaaaaatacaaaaattagcctggtgtggtggcatacacttgtaatctcagctactcaggaggcttaggcatgagaatcacttgaacctggtaggcagagtttgcagtgagctgagattgtaccactgcactccagcttgggtgacagaatgagactccatctcaaacaaaacaaaacaacaacaaaataaaagagaaggaaggaagttgattactcacaatagctaaggtttgaaatcaacctaagtgttcaccaataggtgaatggagaaagaaaatatggtatatatacacaatgaaatgctattcagcccttaaaaataagaaagtcttgctatttgcaacaacattcatgaacctgaaagatattatgttaagtaaaataagtcagcacagaaaaaaaacaaaatcctcgttttttttttttttgagatggaattttgcttttgtcacccaagctggagtgcagtggcaccatctccactcactgcaacctccagctcccaggttcaagagattctcctgcctcagcctcctcaggacctgggattacaggcatgtgccaccacacccagcaaatttttatatttttagtagagataggatttcccccatgttggccaggctagtctcaaactcctgacctcaactgatccacccacctcagcccctccaagtgttgggattacaggcgtcagtccctgtgcccagcccacataatcctatttctatgtaaagtgtaaaaaaaaaaaaaaaattaaactcatagaagcagatggtacaataataaaacaaacaaaaaatcccctataaggttttttgtctggttaagagagcttcttcaggatttttcaggggttatattttcttttattttccacattttcctgttcttcagccaatggatgaaaaaagatacagagaagacacatttaccttttatccgcttcacttccattcactattattcaatgtggatacagatgagagtagcagttttctagtaggacagccacttctctgcaataaacaaaaaactgaaaaaaaattagcatatgcatcagtaacccttctagtaaaataaagattaattttgttgatttctattgagttcctgtaatatttgatcaaaagctagcaaaagcacagtagaaaaggaaaattgttctaaataagaatattgtgaatggttattttgtcaatataagtaaaaatatgacctcacactaatagtctcacctatagttgtacaacatcaaatgctaatttttatttaaaattttatttcatataagtattcaatttatatcacctgcctctgctatttcaatgcctccttcactttatatcagtgaaaaacaggccagcaggtcctaggaaagcacgtcgtgctattgctactttaacaataaacaggtcaagcatggtggctcatgcctgtaatccagcactttgagaggccgaggtgggtagatcacagggtcaggagctcgagaccagcctggccaatatggtgaaacaccgtctctactaaaaatacaaaaattcccaggtgtggtggctcacgcctgtaatcccagcactttgggaggctgaggctggtggattgcttgaggtcatcagttcaagaccagcctgggcaacatggctaaacctcttctctactaaaaacacaaaaaattagctgtgcatggtggtgggtgcctgtaatcccagctacgcaggaggttgaggcaggagaatctcttgaacctgtgaggccaaggttgcagtgagccaggatcatgccactgtactagaccctaggcaacaaagtaagactcctctcaaaacaataaaatcagctgggcgtggtggcgggtgcctgtagtcccagctactagggaggctgaggcaggagaatcgcttaaacccgaaagccagaggttgcagtgatctgagatcataacactgcactccagcctgggtgacatagcgagactctgtctcaaaaaacaaaaaacaaaaactgatcatgaatagcacttttttggttgctacacacgtgtcaaacactgttatttggcttaaggtactggtttttttttttttctttttcttttttgagatggagttttgctcttgttgcccaggctggagtacaatggcacaatctcatctcactgcagcctctgcccacaaggttcacacaactcttctgcctcagcctccccagtagctgggattacaggcacctgcaaccacacctggctaatttcttgtatttttagtagagatggggtttcaccatgttggtcaggctggtctcgaactccagacctcaggtgatccacccgcctcggcctcccaaaatgctgacattacaggcgcgagccaccacattcagcctggttttctattttttttttttttttttttttttgagacagagtctcatctgtcgcccaggctggagtgcaatggcatgatctcggctcactgcagtctcttcctcctgggttcaagtgattcttctgcctcagcctcccaagtagctgggactacaggtgcatgccactatgcccggctaatttttgtatttttagtagagatggggtttcaccatgttggccaggctggtctcgaactcctgacctcttgatccacccacctcggcctcccaaagtgctgggattacaggcatgagccaccgcacccagccctattttttttctaaatttactggtaatataaaattcttcgctaagaagacatgatcttattcaaatgttttatgagatttcattgatgtctgaattatctggaatattaaaatttttcatgaactcaaatcaagtactatacataatcttttagtaaaagcttttctgaggcagagtaagatttataacattttattatcatatggaagaagtgtattaaccatgttttcagtaatcactctgaacacagcattctcagttcacagtgtaaaaagtgaagtagaggttcctcttcaaagacttttctacctaattatgaatagtaacttctcttagaagcaaagtttattcaaagacctgtgctaacattcttaaatatctgctaagcacaattaaaaaatcaatgtactttatgttcttagctcccacaatttagcctaaatatttgccctggcatgcttatactaatccaagcaagcattaggtcatagcctgttcctcctccttatttgaaggtatttttacctttctcagcattccacaagttacttcctccttcctttgttctcctctgcctttgtctcttttaaaaagttctaagttgctaaacaattgggacatacagaatgtgaggtcccattccagccaatgaaaaccagacacagcagtagggtggacacgtcaagttataaatgactctgtctcctctgttcagtgtactcgtggcaaaactgctttctgcaaaaagtaaaaatggccttgctaagaaaaattaaatttattttcaagtgctatttctttacagctccagagaacaaacatttctaaaaccattatggaccctgagtaattcagggggaattggtatctctgtaaagagacagtaaggaaatgctgagtggaggcaccacactgcacatcaatgctttccacatgcacccaatagagtcttaatttaattgggctgttatttgcatagctagataattaccaactttagtcatactattttttagcaactaatggcatctgttacccattaattttatacatttgcttttttgaaaaacaaatcttttgttaattcactctaaattgagactacatttacaatcttcagtttttcagtgttaaagcaaatcagagaagagcaatgtgtgtacataatgtgcattttcctgcctaccaaaattattctggctgggaaaagtggctcatgcctgtaatcccagcactctgggaggctgaggtggatggatcacctgaggtcaggagttcaagacaagcctggctaacatgatgaaatcccatctctactacaaaaattatccgggcataatggcgggtgcctgttatcccagctactcaggaggctgaggcggaagaatcacttgaaccagggaggtggaggttgcagtgagctgagcacgtaccattgcagtgcagcgtgagtgacagagtgagaatccttctaaaaaaaaaaaaaagaaattctttcttcaattacttggaaaccctgggaagcccctataaaatactccctttgaatactttagccaggatttcagatttcaaaaggtcaaaaacaatcattgagcaaagcttaaatcttgcctttgtttcttgttagtcatctggccatttctgtaagtacggcaattatgcgaagccattgaaaaaatgtggtcttggtaaattttattccatttcaaatgttttctctaatgttaccttggtcatgtgaatctaaaagaaactatctacataactaatcatggattcaaaaaatattcatattaatgtgtttacagtttaatcttgtattacagtatagtagaatcctctataattagaagttaattatttataaattcattgtttttaaggtttttcaaatatgaaaacagacaattaggtatactttttgaagtaagttcaattttaggacattacccactggtcttcatggcatttctgtaataaatagtgtaaacctgtgtcaccagaatggtgcagacatgctgattgaattagaatgagttcagccttgttggtagactattggtatcccagaggctgatcattcactacagcttactaaatactgttccataatgccagtgagcacttttacccaggttacctttttcctcccattaatgtggacctgttgtggtctcctgtttctcttaagctatcccagatgagaggtgattatttcttgaatgaatgagattcccttttttttccctctgccatagaatcctcttatgttccttactggaagcaacatggaggaggcagaaatgatggcaagatacaaacatttttcccgccatgtggccaccataagcagcttacaacatgttctacctagaagtcacttactttcaggccagcaggggtgtttttctgtgatgtgtctctttctcttaaaagcacctctgattaagtttagcacaatcaggataatctccattttgataaacacaaagtctacggatgagtaacctaatttcataagtgatttcccaccacagtcacacattttttttacactcaagaggaaagtatgacacagcacgtgtgcaacagactggtaatccagggtattatcttagaatgttgcctacccacctaaataaatgtttaaaatcatcttttgctgggcacggtggctcatgattctaataccagcaccgtgggaggctgaagcaggcagatcatgaggccaggagtttgggaccagcctggccaacatgatgaaaccctgtctctactaaaaatacaaaaattagtcagacgtggtggtgcatgcctgtaatcccagctacttaggaggctgaggcaggagaattgcttgaacccaggaggtggaggttgccatgagctgagatcacgccactgctctccagcctggaagacagagcaacactccatcatggaaaaaaaaaaagagtctttctgctgcttttgttatctacataaacaaagatatcaactggatataataattaactactttttagttttattcattacaaataactatttttctggcttaaattattttttatgcaccatttatacattcacacacacatagaacaataaaaatatatccaattattcaattttggttgaatgttcattcaaataagtgttaaaaatgatttttttttcctgttttaagagggcttttattattgtactcaagagagttgtttctggagacaaagttgcctgtgctttaataggcagactctggggagaatccgaatcacaggccagaacattttatattaataaattcaatacaaagcagaaagtatagatttgctttcaccattttaaaagtgtttagttttgttaatcacctaaataacataatttgttttgttgcagtaattgcttttattctgaaaatatgtacaaacctatactcacacaaaaacactcaattcataattttcttacacctcaggtttatcttcagagtaatatgtgtatatttaactctatgtaaattaaaactaaaagtctatgtgtttgcaggcagagaccacatgttcaaggaaaactatattacaagtatttataatttttcaggactcagaaatgtatggattttatttttattttattttttgagatggagactcactctgtcagccaggctggagtgcagtggcatgatctcagctcactgcaacctctgcctcctgggctcaaacgattctcctgcctcagcctcctggcatgtgccaccatgcctaatttttgtgtttttagtagagacaaggtttcaccacgttggccaggctggccttgaactcctaacctcaagcattccacctgtctcggcctcccaaagtgctggaattacagatgtgagccactgtgcctggccgtattttatttacatttttgtataattattatgatcatagaaataattctgtagtcaataacaatttaattgtacattttaaaatgaataaaagcatataattacactattggtaatacaaaagataaatgctagaggtgatggataccttatttaccataatgtaattactacatattgtaggcctgagtcaaaagatgccatataaggcataaatatatacacatattatatacccacgaatacaaataaaaaatttaaataataaagagtcaaaatttaatctatgggaacaatatttaactcatttgcagtttaaagccactgacagtgattactaaagatgttattttacaatgtatgaaatagtatattcctacaatattgtacctacacccttgagtaaagtgggatacagttagtggcacaataatggttcattaaacgcacggtagtcttaccatggtaaaaataaaataaaattaagttcacaaataatctaacaaacttttttttttttgagacagagttttgctcttgttgcccagactggagtgcaatcgcacaatcttgccccactgcaacctctgcctcccaggttcaagtgtttctcctgcctcagcctcctgagtagctgagattacaggcatgcaccaccatgcctggctaattttttttgtatttttagtagagactgggtttctccatgttggtcaggctggtctcgaactcctgacctcaggtgatctgcccaccttggcctcccaaagtgctgaaattacaggcatgagccatcaagcccggccctaacagttttaaaatgcactgcattttattacataaaagtacaagtagtaaagtaatatactcatttattttaatatacttttaattatttctttgtgtcactataataaagtattgctctgaacatttacgttatacattacttaatagaattttactacaaacagcttctccacttgtattttcattatgcgtcttacattttaatgttcttactattttatagaaaaagtcataatgtccaaataatgtaaaaaaatcgaatatctctgatgcagaagccactgatcacatgctttctcacatgtgaatagaaataaaataacagcataatttgaaagctgtattacatcattattcagctttcaaaaaattttattcaaggaaacaagtatactttcaacgtaattacaatgcttccaaaaatctactccttttaaagttaaatagaaatcatttacctaaaaactgcagttgtggattagtttttatattcaatgctctgatttagtgtaatgtctgaagtgtcggggccttagttattctactgtaaactctcttgatatttatatacaatctattttgaattaaatattttttaatatttactgcatctgcaaaattatattttagcataaactctctgttgttttctaagctgtagtttctggggaaaaaaaagtgtttctaaacttaatacatttgtaggactcatctccaatataaattccctgatgttgaacaaacttgagcaactgctttaggattttcctccagtacaaaatgtgtgcaataagatctgtgatactagtaaatgtactatgtaactccctttatatttgtaatgcttgtcttcacaataaatactcttcttcactttaaaggcttatacttgctgaaagttttgacagtaattgccattttaatgcttttattaaaaggaagatttttatgttgagttagatgtgagtaggaattaataggttttccatattccttctatttgtacaatttttctcaaggatactagcttttctgtgagataaggtgtaagaactgattaaaagttttgccacattcttcacacttgtaggagttttgccagtatgaattatccaacctacaatcaagagtggcaaccatataaaggctttgtcacattttatatatttctagggtttcacactagtataattattgttatgtgtagagaagttggaggtgttcgtaaaagcaatgtcacattttttagctttgcggatttcctcttcaacatgaattattgccatgcctcttaagaattgagaacttgtggctgggcgtcgtggctcacgcctgtaatcccagcactttaggaggccaaggtgggtggatcacctgaggtcaggagttcgagaccagcctggcaaacatggcgaagtcgcatctctactaaaaataaaaaaattagctgggcatgttggaggacacctgtaatcccagctactcaggaagctgaggtaggagaatggcttaaacccaggaggcagaggttgcagtgagccgagatcatggcactgtactccagcttggatgacaagcatgaaacttcatctcaaaaaaaaaaatattgaaaacttgttataggatttgccacattcctcaaacttgtaggatttttgtccagcatgaattatgtgtaagaagggttcagaacttcctaaaagcgttgtcacattctttatatttgtagggtttatgttccatataaattctcatatttagtaaaagttgatagctggttaaaggctttccgacattcatcaaactcacagggtttctctccagtacgaattatcttatgtctagtaagggcagaggtgtccttaaaggctttgctgcattttcttatttgttgggtttctttcccgcatgaattatctaatgtctactaaggtttgaggatgaaataaaggctttgccacatttatcacacttgtacagtttccctccaatatgaattttcttatgtgaaaaaagcatagtgggatagcttaaagctttgccacattcctcacatttatagtttctctccagtatgaattaccttatgtgtagtaagggtagaggggcacttaaagcctttgccacattcttcacatttgtagggtttctctccagtatgaattctcttatgtctagtaaggataaaggagcgcttaaaagccttgccacatcgttcacatttgtagggtttctctccagtatgaattctcttatgtgcagtaaggtgtgaggacgagttgaaggctttgccacattcttcacatttgtagggtttctctccagtatgaattctcttatgtgtagtaaggatagagaagcacttaaaggccttgccacattcttcacacttgaagggttgctgtccagtatggattatcttatgtgtagtaagggaagaggagtacttaaaggcttcgccacattcttcacatttgtagggtttctctccagtatgaattctcttatgtgtagtaaggtgtgaggaccagttgaaggctttgccacattcttcacatttgtagggtttctctccactatgaattatcttgtgtgtagtaagggatgagaagtacttaaaggctctgccacattcttcacatttgtagggtttctctccagtatgaattcttttatgtgtagtaaggacagaggggtgcttaaaggctttgccacattcttcacatttgtagggtttctctccgctatgaattatcttatgcgcagtaaggatagaggagcgcttaaaggccttgccacattcttcacatttgtagggtttctctccagtatgaattatcttatgtgtagtaaggttagaggagcgcttaaaggccttgccacattcttcacatttgtagggtttctctccactatgaattatcttatgtgcagtaaggtatgaaaaccggctaaaggctttgccacagtcttcacatttgtaccgtttctctccagtatgaattctcttatgtgtagtaaggtgtgaggaccagttgaaggctttgccacattcttcacatttgaagggtttctccccagtatgaattttcttatgtgtagtaagggttgaagactggttaaaagctttgccacattctatacatttgaaaggtttttttccagtatgtcttatcttatgtctgtttgaatttgaaaatttatgaatgactttcacatatttatcacactgaaatattttgctttgagtagttgtcaaatattggttaagtccattataacctcttttgtgcaccttacactcatctacactttcacagccctttttaaactgtaaattgtcatgtccatagttttcatatcttctcagtgtcactttttggaaagaatcttttatgctctgctctggccaaagatctcgggcaaaatgagaacacgtaactgaaagaaacaataaaagcacattacttcaattggtagactcagataaatatactttacagatctaacctatataattatacaaactacataagcaagatgacacagcaaaataccacaaactgtaatttcttcctggatacataaatgtaacaaaagtggactgcccaaaatacatttgtaaaaaatttataagtgagttaagtgtatgaagggccccaggtgagcacaatgcaaagagccacatagaataaaaagaaaattctgttacttatacccaacagagctcttcctgctctccagtataatattgtgcctttaaaagtaaatttccagtcggatgcagtcgctcatgcctgtaatctcagaactctgggaaggtgacacatgggtggatcatgagaaattcgcccccatgacccaaacatatcccaccaggtcccacatctaacagtgagaatttatattgcagcatgaggtttgaagaacatagacatccaaaccatattatagaccacctaggattcacagccacacacaaaactctccagtcaaaaccaagataatacacagtattcctatttgcatctggtgtattctgttaggacacatatgaagttttattaaattaaaaatactatgtgctgtagctcttggctataatcctaacactttgggagatccactggggccaaaagtttgagaccagcctgggcaacatagtgagatcctaatactacaaacaagcaaacaattatccagacatggtagtgcatatctacagtcctagatactcaaaaaactgaggagaaaggatcacttgagtccaggaggctgaggttacaatgagccacaattatgccactgcactgcagcctgggtgacagtaagatcttgtctcaaaacaacaacaaccaatcatttttaaaacactaaaattacacactgtgtgttttctaacaaaaactgaatgaaactaggaattaaaagcaaaagtcaaactggcaaattctaaaataagtgaatatgaaatacactctacaacatattcttgctcagggggcaaaaaattttatttttcaaagttgtcaatacaacctacagttaaaacctacagtaacatggccaggcatggtggctcatgcctgtaatcccagcacttttggaggccgaggcaggtggatcacgaggtcaggagattgagaccatcctggctaatatagtgaaaccccatctctactaaaaatacaaaaaattagccgggcatggtagcaggcgcctgtagtcccagctacttcagaggctgaggcaggagaatggcatgaacctgggaggcggagcttgcagtaagctgagattgcgtcactgcactccagccagggtgacacagcgagactccgtctcaaaaaaaaaaaaaaaaaaaaacaccacctacagtaacataaacaatgtgacactgacacaaagataaacaaatgaaagaacagaatagagaactcagaaatgaacccttctgtatatgatcagatgatcttccacaaagttgccatgcatacaaaatagaaataatctcttcaaaaaatgaagttgaaaactgaatatcaacactgataaagttgtttatttccttgaatgacacaataatacattttaaataaaatgcttaaacataaaaatacacaagtgaggaaaagcatttgaaagaacatacaaaatcattaatttatacagaaattaaaaaaacacacaatgacaagatcaacttacacccattaggtgcaataaaaataaaacccatgttgattgctggtggaaaacaaagacacagccattattttaaaatgttgtaaatgttcctcatttataaatctctatccaaaatatgtaacacaggccaggtgcagtggctcaagcctgtaatcctagcagtttgggaggctgaggtgggcagataacctgaggtcaggtgtttgtgaccagcctggccaacacaccatttctactaaaaataaaagattagcttggcgatgtgacgtgcacctgtaatcccagctacttgggaggctgagacaggagaattgcttaaacccagaaggcagaggttgcagtgagccgaaatcgtgccactgtactttagcctgggcaacagagtgagactccatctaaaaaaaaaaggaaaacaacagcaacaacaaaaatatgcaacacaggacctggaagatataattgaaaatccatgtgtattgtaccagtattcacaaaagccaaaaggctgaagcaacccagatgcctcttgatttataaacatatcaaaaaatgtaacatatacatatgatgaagtattattccaccttagaaaaaacaatcttgtcaattttaagatgaactttgagaatattatgtcacctgaactaatccagtgacaaaattttggatactgtatgattccacatatatgatatatcttaagtagtcaaaatcataaaatcagaaagtggaaggtttgtctgtcaaaggctggagagagggtaaaatgagcagttgttacttaatggtcaatggcttttagttttacaagatgaaaactttctaaaagtcttttgcttaacaatgtgaatatacttaacatgactgaaatgaacagcttttttttttgagacacggtctcactctgtcacccaagctggagtgtagttgtacaattttgacttcccttaaatctcccaagtagctggggccacagctgcacatcactatggctggctattattattattattttttatagagaggtgtcaccatatgttgccctggctggtctcaaactgttgggctccatggatcctccagtcttggcctctcaaaatcctgggattacaaataagagcctccaccaagcctggccctgaaatgcacacttcaatagatttaaggtggtaaattttatattacgtgtttttaagcaattttttttaaagaaaaactgaaaaaaaaaaaaaaaaaacaattatgtatctttttgaaatttactttcaaatcatagaagtgtctctcacaaaagcaaatatatattcattgttaaacacatggtgataataagactatctccataagtactcacttagacaagataaaactaccatcaaaaatcagctaagaaagaatataagccataactaaaattggggtcatatttatagataaatacacatacaaatgtaatctgattatgatagatatgcataatttatctcttaattaaaccttaaattgacttaaagtgtacaaaaagaactgcaaattgtctaaaattataatacataagtaaaaccaaaacacccaataaactaatcttaagaaacctacactgaggccagaggcagtaggtcacatctgtaatcccagcactttgggagaccaaagtgtgcaaatcctgaggccagcagttccagaccacattggccaatatagtgaaaccccatctctgctaaaaatacaaaaattagctgagcatggtggctcatgcctgtagtcccagctacccaggaggtcaaggcagaagaatcacttgaacctcggaggggttcaaaacttcaaaacaacaataagagaaatgtttactcataaaatcttgtatgcaacattgaagtataattaaaaaaaaattgtcaggccgggcacagtggctcaaaactgttatctcaacactttgggaggccaagatgagcagatcacctgaggtcaggagttcaagaccagcctggccgaagtggtgaagccccatctctactaaaaatacaaaaattagctggggacggtgacacacgcctgtaatcccagctacttgggagactgaggtatgagaatagcttgaacccaggaagtggaggttgcagtgagccaagatcataccactacactccagcctgggtgacagagtgtgactccatctcaaaaaaaaaaaaaaaaaaattctagataactgcaatatttaactgttggtgtgtactcacaaaatgcaagtattctgaatcattagcatgcactgtgtggcagtaaaatttcagagattatgcagtataattataaatagaagattctaatgagaaaataaattagcatttaaaagaaactagttccttttaatgtcttaaatatatggtattcttacacaaaatgaaactgctgtaatcaaacattggaagcaaagagtacccttacattgttaaataagaaatatatattttgtagaatggggttagaccctctgatatgtaaaacaaatattaggaaataaactattttattatggagatataggctgaaaaaagtagatgaacatcctataattcctttttacctgcagcaaatttaaatttataaataactattttagtaactatgggtgcctactaattatgtaatttacttcaggcatatcatgcaaattctagcatattgtcttcaatatttgaatctaaaattacagacaaatctgaaagagaacatagaaagtaaaaatatatagggagagtgacatcagtaaaatgaaaagattaaaagtgccctattttcatattcccttacagcaaaacaagtcagccatcgctgacaaaaatacctttatgagagaaccaggattatgactcacacctgtaatgacagctccatggaacattaaggttggaaaattgcttcaggccaggattttgagaccagcctgggtctcaaagaccagatcaaagatgtagcaagatgccatttccaaaataagtgcctctaagggagatttgagagctagggtgggagttgtgaaatgctgttaaagcgtaaggttgagaagtgttctattcagaaggcaggctctcattcacgtgggaaactacagtacccctgttcatggctacagaccaggatagggtttacccaagttggtcccacagagaattctgaacttactctgtaaccagctcaaactcccagccacagtctggcagaggtcctgccattccagagacctggatgaaggcacccatttacagcaatgtaggcaggcttgcagactttggcctttactggggtccctgaagaggttcaatgactcagtttcggttacctgagccacagtttatggtcagttctgcctacatagaagcccacacaattgggccgggcggggtgcctcatgcctgtaattccagtactttgggaggccgaggcaggcagatcatctgaggtcaggagtttgagaccacccttgccaacatggtgaaacccagtctctaccaaaaaaatacaaaaaattagctaggtgttgtggtgagcaccagtaatcccagctacccagcaggctgaggcaagagaactgcttgaacccaggaggcgaaggttgcagtgagccgaaatcacgccattgcactttagcctgggcaacatgagtgaaaccccatctcaaaaaaaaaaaaaaaaaaaaagaaagaaagaaagaaatccattgcaattgaagaaaaataagtaaaagttgctgtttgtggatcatacatcttacattttaaaaaccataaacagtacattaaaacctgtctaaactaatgaatacactgagtaaattagcaaaatataaaattaacacacaagtacatgtattgtttcatacgcttaaaacaaactatctgataaaatagaggaagaaaaaatcttatttaatatagcattaaataataaatttctgagaaaaaaattaaccaagaaggtaagaaaatgtttacaataaaaaaatgaaaaaattagaagatccaaacaaattttaaaatattttatgtctagggattgaaagaataaatattattaaagtttcatattatccaaagtgatctatagattgcataaacgtcctgtcaaaattgcagtgttttttttttacagaaatggaaaatacaattctaaaatttacatgaaaataaactctgaatagccaaagcaatcttgaaaaaaaaaaagaacaaagcagaaggatatcatacgtataatttcaaactatatttcaagactataatagtaataaaaatagaaaggactacatagaaaaataaacaaaaaaattggacagaaactactactctcacacatcagacctgatgcaaaaagagaaataattctcaaaatcatgcagatatttgtgtgtccccaaaacaatgaaaaagcagccagactgtgcagtattttatatgccatgaagaggactctggctctcactgtgaacttgaagggagctcaccgaaagaaaagtagaatttttacagaatttaaaagcataagcagaagatgcccctttataagagcaaaatttaaaaaagaaaaaaaaaaaaaaaacagctcccaggaactattttctttggagcacagcttcccaaatcacactttaaggactggctttctctttgactttgggacctcttatctgtgtcgtctgctatattcattttcacttgcacctacctgaggggttggctaccatctcatgtttcttcatggtcaaaggtttttttccttgctccagacaggtgatgaggtctggcttagagacaacaatacctgttttattaaaaataaataacatgaatcttgctcatattctccaattacaagctagtaatgtgctcgcaaagacaatgtaataaaatattatagtaaattaataccaaaatacaaatttataacagaaatttctaaatatttagaaaatactttaaatttgccaggtgcagttactcacgcctgtaatcccagcactttgggaggccaaggtgggtgaatcacgaggtcatgagttagagaccagcctggccagcatggtgaaaccccatctctactaaaaatacaaacattagccaaacacggtgacttgcccctgtagtcccagatactcatgaggctgaggcagaagaattgcttcaacctgggaggtggatgtttcagtaagctgagatcacaccactgcactccagcctgggtgacagagtgagactctgtccccgaaaaaaaaaaaaaaaaaaaagaaaaagaaagaaaatactttcaatttgtaggtttcttaattttccttcctggtactactgaatcaaaaattggtggtggcatttagattttcaggtggaagctacaatagtttatgtcagtaaatttctggaattaccactaatttggagtgaagattacagctcacctcacaaatatggaaaatttggattaagatgaaacatcttgaagaaatttttttcttttctttttttttccccttgagacaaaatcttgctctgttgcctgggctggagtgcaatggcattatttcgactcactgcaacctccgcctcctgggttcaaggtattctcctgcctcaccttcccaattagctgggattacaggcatgtgccaccatgcccggctaatttcttgtacttttagtagaaatggggtttcaccatgttggccaggctgatcttgaactcctagcctcaggtaatacccccacctcagcctcccaaagtgctgggattacaggcatgaggcaccaaagaaattattttctaaatgaacaaattctgaagattttcttgaaaaagtggatctgaaactcttttataaaagaataaattactaaaaaaattctacaagagagagaaataaagtcttttgtgtatattatgaattatgtattaaagtttttctcaccaaggaagaccaggtttctgtagttctctaacatcacattcctatataaattccgctgtgcagtgtccaggcaatgccactcctccagagagaattctatggccacgtctctaaattgcaatggcccctgaaacacacacacaacatacgtttttaccaagtagccaagggtggaatttttaatttgacttaagttcaaatgagagagtaaagacaaatggttctgacttataggactgactaaaattatccaataaaataactttcaacacagaaatattctctaaagtattctctgagaaaaaagaacagcataagatccacaacatcagttcatgtatttttctagatagtaaagtgtaaaattaagggtatgaacacgaacatgtacatttttgagtgctatgtttacatcatatggaatgagctgtgaatatttttcagatgacaaagacatgttgagtttagaaggcacctctaaaatttaaatatatacaataagttgaagaccttgttatgcagggtttttttccagaagatctggaataaagtttgattttttgaatttctaacaagctcaccaatgatgtcaatgtttttggcccaagaaggatattttgtcaaacatccagtaagtggaagagcctgtttttcccagtttttctggcctgtaaacaaagataagagtcttcattttccaaagaaaaatatgtagaaaaaattaagaaaaaaggacaactgccagattaaatgtggtggtttattcacatcagctgcataaagatacttaataatgaagagaaaaataatcagctacatagtgaaaaatatctgtcacagagctatttaagcaagtgaatcattaaccattaacttcactagaagaaatttttatgttgtgctaatgcacatagaagaacacagcatcactgttgaaatattcctcttttaaaaaagtaaataaaatctgattcaatcataaagaaccatcagttttatgcaaacctcaaaatacagataactcctgtgttctgtaatttttagtagtaattttaaatagacttcatttagcaccctaaagagcaggtatgtcctaataagttttttcagaactttctgggtaataaatggcatcccatttaaataagcatttctttttttttttttttttgaggcaaagtctcactcttgtcccccaggctggagtgcaatggcatgatcttggctcactgcaacctccgcctcctgtgttcaagtgggtctcctgcctcagcttcccgagtagctgggattacaggtgcctgccaccacgcccggctagtttttgtatttttagtagagacagagttccaccacgttggccaggctggtctcgatctcctgacctcaggtgatctgcccacctcgaccttccaaggtgctggaattacaggcatgagccattgcgcccaatctaaataaggaatttcttttcttttcttttcttttttttgatatggaaaatcactctgttgcccaggctggagtgcagtggcgcaaccttggctcactgcaacctctgcttcccaggttcaagctattctgctgcctcagcctcctgaggagctgggattgcaggcacccactgccatgcctggctaattttttgcatttttaatagagacggggtttcactgtgttagccaggatggtctcaatctcctgacctcgggatctgcccgcttcagcctcccaaagtgctgggattacaggcatgagccactgcacccggccaataagcaatttcttaatcctgttcggcatacagctaatggaacacactaatggagcctcaacattacatgttctccatctttactaaggaccacagttttccccaatagaacatgagaagttatgatgtagagaatgaagaaaaggctctgggatacagcaaagaaacatttttcagacacctttgactatcgtaagaattttaagaagtacttaaaccaaactccttagggaggagaaacacaagtagagaagtaaaggtttgtgagtactaaacgcatggcagtccagaaggcagagtggacacagcttttcagctgaggcacgtttacctaaagaaaagccttttttttttgttctcctatctcctccttcactggaattccttctcagatgagattctttggacaaattacacctgaatcttgagaatatgcctttaaaggtgtcagtaccacaagtatacctgctagcatgacatcaactggcagaaaaagacagaaaaatccacccatttctgtcctttaaaacagaagaggttcaggaaaaatgagctgctccataaagatgaaaatataagtttctcctttcctgtcctcaggggccctcccctaccacagacaccatccatttctgctacagtaatggaaatatgtgccactgacctgtccctaccaaacccaaacagaacagaccctgtggccaccctttagtgcaaaggtggaacttaacgctcatgaatgtattttgcagccttcatacctgattctggcctcaccttacagtcacataaggcccttcgttaaaacaacatggatgcttccacccagaacaataaacagaagctgtggggagggcacaagagatttctgcaaattggccatgtgatcctaatgagaggcctgggctgataaccactaagctaagcattgcctctcaagctttaacgagctaagctaagcattgcctctcaagctttaacgagcttataattcacttggtaattttagctccactttatgtaatgtgattctgcaggtttgaaaagggtccatgaatgggtgtttcaaaaacaagttccctgtcaatgctgatgttgctccccattggctcattattaccattagtcagagaagcagtcacagcacatagtcccttatacttagcactcttgtcacaaccaaatacttctcatacaaacaaggacaacccatctccatcctaaagttttatattatttgatggctctttaaagtttacagaggaaacaaggcagcaatgtctgaataagtctgtttttaaaaaacaacatgtacacatgtactaatgcactgtttgttaaacaggtactatgtgcacaatagtatgatacagagcactgtgctgggtataacacattaggtgatttaattctcataacacccggggagctggtactaagggtttaatagttttcaagatttagttaaagggcccagcatttttatttcttcttctgtttctctctcatcaattttttaaaattgtacagaataaaagctaaatatagccagatgaaagagatagaaagaaagaggttaatgtagtttagacaattttattctgtttatatttacttttttgtgacttatggagcaactactggatctgcaggaatagaaaacaagtttctaaataaatgtctccgcaagcactggttttaatagaagattaaaaaactaggaccctaaaatacatactttatttatcccatttatctgtttgtggtttcaggaaattgtgagcaccagctctagaaaggcagcaggattcaccagccaaaactttgatctcttctaatcagttatctgaagcaagactacaagatagggtcagacctaaataaggcctccaaaaagggtgaatctgaacaggtctgggtctggctcagggtgaggaccctatgtaaaattctgctctctatgtcactgcagtactaccagttttgttttttctaagcttacctaaaaaaaaaaaaaaagaaaacttaaatcccagagtttctgtaattttagtattttctagccactgccctgtcaactttgtactacattctaatacgcaatttaaacaaatcctttaaggttttctagggtaattttttttttttttttgagatgcagtctccctctgtcacacaggctggtgtgcagtggtgccatctctgctcactacagcctctgcctccagggttcaagtgattcttctctctcagcctcctgagtagctggaactacaggtgcatgccaccacgcccagctaatttttgtattattagtagagacagcatttcaccatattagccaggctggtcccaaactcctgaccttgtgatccacctgcctcggccccacaaagtgctgggattacaggcatgagcaaccatgcccagcttttctagggtaattttattagaaaataaatatgtacatgtagcaaggtaaaagaaatagaaattatatggccaggagtggtggctgatgcccataatcccagcactttgggaggatgatgtgggtggatcacgacctcaggatttcgagaccagcttgaccagatggtgaaaccccatctctactaaatatacaaagattaaaaaaaagatatatataaattagctgggcatggtggctggcacctgtaatcccagctactcaggagcctgaagcaggagaatcgcttgaaccagggcagcagagggcagcagtgagccaagatcacacaactgcactccagcctgggtgacagagactccgtctcaaaaaaaaaaaagaacctataataacaattcttctgttcataaatatgccttcagatgtagacatcagaagtctcaaaaatataaagaaagtggcctaaataaagcccaaggtgttggacacatctatgtattgcaccaaccatatgatgcacaattcaattatttatccagttgctagtctagactaaaagcttctggattgtaggaaaaaagactgctgcatagtttttttttaatggccatataaaatggaagcaactagtttatccatttgggtctccagatcttttccttctttaccatccaagtactaggaaactggagaaactctcatctgggtaccaaccaaagacacctcttgtatgaggggatgaaaaaacacaggatgactcatttcccttacactgagacagaagcagaattaaccactcttatcagcctaacacaattctgctctgaacatcctcaaatgcctcaaagacacccaggtgattgtgagggaatttccagtgaccctgggctgatggcccaatgataagccaggctagagagactcaggctgaagaccaatgcaacagaatagagagcccagaaataatgccaccctcctataaccatcagatttttgacaaagctgacaagggaaatgtgggaagaattctctctttaataaatggtgctggaataactacctagcactatgtagaagactgaaactagctcacttcattacagcatatacaaaaatcaactgaagataaacacttaaatgtaagcttaaaattataagaaacactgcatgaaaacctaggaaataccattctagacacagaaactggcaaagaattcatgaggaagctaccaaaagcaactgcaacagaagcaaaaattgacaaatgggacctatttaaactaaagcgcttcttcacagcaaaggaaactatcaacagaggaaaaagacaacctacagaataaaagaaaatttttgcaaactttgcctctgacaaaggtctaatatccagaatttattagaaacttaaacaagtttaaaagacaaaaccaaacgacctcattaaaaagtaggcaaaaaagatgaacactgcttttcaaaagaaaatatacatgtggctaagtacctgaaaaaaatgctcatcgctaatcacgggagaaattaaaagaaaaaccacatgtggctaagaagtacttgaaaaaaatgctcatcactaatcactagagaaattaaaagaaaaacaacaacgagatatcacttcacaccagtcagaatggctattttcaaaaagtcaaaaaataatagatgctggcaaggttgcagagaaaacggaatgcttatactctgctggtgggagtgtaaatagtttaacaactgtaaaaagcagtgtggcggttcctcacagaactaacaacagaattatcatttgacccagggatctcataattgggtatatacccaaagaaacataaattattatattataaagacacatccacatgcatgttcactgcagcactattcacaatagcaaagataaggacaggccctaaatacctatcagtggtagactgggtaaagaaaatatggtatggtcagatgcagtggttcacgcctgtaatcccagcactttgggaggccgaggcgggtggatcatgaggtcaggagatcgagaccatcctggctaacaaggtgaaaccccgtctctactaaaaatacaaaaaattagccgggcgcggtggcgggcgcctgtagtcccagctactcgggaggctgaggcaggagaatggcgtgaacccgggaagcggagcttgcagtgagccgagattgcgccactgcagtccgcagtccggcctgggcgacagagcgagactccgtctcaaaaaaaaaaaaaaaaaaaaaaaaattggccaggtgtggtaatgcccgcgtgtagtccaagctacttgggaacatgaggtaggagaaaattgcttgagccagggaggttgaggctaaagtaaaccaatatcatgccatggcactctagcctgggcaataagggagactctgtctccaaaaataaaatgaaataaaagatttagtcaaaataaaatatggtatataaacctcatggaatactctgtggccattaaaaaaaaaaatcatgtcctttgcaataacgtcaatgaagctggagaccatcattcttagaaaacaaatgcagaggcctggcgcagtggctcatgcctgtaatcccaccactttgggaggccaatgtaggttgatcacttgaggtcaggagttcgagaccagcctgcccaacatggagaaaagccatctctactaaaaatacagaattagctgggtgtggtgccatgtgcctgtaatcccagctactcaggaggctgaggcaggagaatcacttgaaactgggagacggaggttgtggtgagccgagatcacaccattgcactccagcctgggcaacaaaagtgaaactccgtctccaaaaaaaaagaaagaaagaaaaagaaaatactgtagaaacagaaaaccaaatgcatgtttttatttataagtaacagctaaataataagaacacacaaacacaaagaggagaacaacagacgctgcggcctagttgagggtggagggtggaagactaagagaatcagaaaacatacctgtttggtgctatgcttaatacctcagtgacaaaataatctgcacgcaaaacccccatgcaccaaaacaaactcatgtgtaccccaaaacaaaaataaaagctaaaagaaaaaattaaatccctgggtgggagagattgcaatgtaggtgagaggactgatttttgctacagatagttgtcctggtgcagctgtactctgatttattactgtgtgcacgcagacatatgagattatgaacagctgattcaaaatgctaggttggtggagaaaacagattgctgctgcagatttagtgtctgggggtggggatacgccaggagacttgtagagacttgtgggttcttggcaagaaacactaggatcaaaaacgccgtggtgaaggtcctgagggtggtgcctactcctgggaggagggtggacatgtcaatgtctagtgtgtgtgtttgtgagtgggtgggaatcctgtggtggcagctgtgggaaaagggggtctgtcatcagagctcctttcttctaagttttcagtcctctgtcaccctgggagaagacctggaatcacaggacaatgggcagtgtgacagcctgtgaccagacagcagagctcccattcccaaacacctagagttttattccaggccagacttctgtgatatctttttcctggcaccaaatctgtagagtttgctgaacattaaacaattctccaacaccaactcattgtctaacatttgaattctgacaccaccgagagtcaacacagaccctgattcagggctcagtcccacaacactgtcctcactgcagatgccaatcacaaaccccatgggcttatctatgcttctgagctactgtttaaaaactggggagtcccataacctccctgaagttcaataatttggtagagctactcacagaactcagcaaaccactgcagtgatgtttaacagtttaatatataagatgcagcccaggaaaagccaaatggaagaaatgcacagaacgaataaaagagatggggaaagatgaaacacacagataatcctggaaaatatttgtgattaataaaattctccatcttttgtgtgctccaggaacagtttatggaaagaaacactgttcccattatgacttagtgctctcttttcttatctatcacacaggcacacacacacactgcacattttctcctttttctcattaaaaaaatcagctgaatttgtcttcagcgctcaaaatatttcttcactttgtcacccaggctggagtgcagtggagcaatctcagctcactgcaacctctgccttccaggttcaagcaattctcctgcctcaccctcccaagtagctgggattataggcacccaccaacacacctggctaattttttttttttttttttgaaatggaatttcactcttgttgcccaggctagagtgcactggtgtgatctcggctcaccacaaactttcaagccatttcccaggatcaagccattctcctgcctcagcctcatgagtagctgggattacaggcatgcaccacaatacctgatttttctttttctttttttttttctgtagtagagatggggtttctccatgttggtcaggctggtctcgaactcccgacctcaggtgatctgcccacctcagcctcccaataatttttgtattttagtagagacaggatttcaccatgttggccaggctggtcttgaacacctgacctcaggtgatccgcctgtctcagcctcccaaagtgctgggtttacaggcatgagccaccacacttagcctaaaataaaatatcccttaatcgaactcttcttaagcttatctccctccctcaggctcctgaactttgagctaccctcagtctgagtcagcatacaaccccattttatgtccctcctaagaacatgctgatttcagggtaagacatcctctgatctaaaatatgactttttcactctccgtttgccattcacctcccacctcctttctaatcttgtttgctcctccctaaaaaagaaagcccttttctgcttacatctttgcaagccataaagatcttaaattagttggtattttctgctgttgcaattttttttggaattcatttttttaacataaattaatattttttattttacaaagtgtagaaagtgccacaaaacataacaacttcatcatcaataagaccctctaagtttcctttcatcttaacctcagctgcatctgcctgtggggccccagctttccagggctctgtagcttctctcaggataaagcctccttctatggctggggtgagcaggctgggacatgtgcaggggaggctccccagaaaaaaactgagtctttagtaacatcctgttgcaggcttaatatcagccttagcttggagtcactaggttcaagctttgatttccatgtcagagttattcacttggtttttgaaactaagtgttagaaaaatccagggaaattactcaaacacagtgtttacataagaaggaagtgcttactttttttttttttttttttgagacggagtcaccctgtggcccaggctggagttcaatggcatgatcttggctcactgcaacctctgcctccccggttcaagaccttcttgtgcctcagcctcccatgttgttgggaatacaggcgtatgccaccacacccggctaatttttgtatttttagtagagatggggtttcatcatgttgggcaggctggtctcaaactcctgacctcaagtgatccactcacctcggcctcccaaagtgctgagatgacaggcgtgagccactgcacctggctaaggtgcttgcatgtgatacctccataagaaaagtaaatatatctacttctttcagaaaatatatgtattattttattatttatcttaaaaataagtaggcctggtgcggcaaatcatgcttgtaatcccagcactttggagggccgaggcaggtagatcacgatgtcagaagatcacgaccattttggccaacatgttgaaaccccctctctacttaaaatacaaaagaattagctgggtgtggtggcacgtgcctgtaatcccagctactcaggaggctgaggcaggagaattgcttgaacccaggaggtggaggctgcagtaagccgagatcacgccactgcactccaacctgttgacagagcgagactctgtttcaaaaaaaaagtaaataaataaaataatgtagtaaaaaattagtcatatgggaacacttctagaaggtaccatgtttcatcacatataatttagcatttaactcagaactcaacaggatatagaactgagatattcactgtcacaaatttcccctgcaaaaagaggaactaatgtgttgacgaatctatgtaactcatcaattatctaccacattttcctgtggaaatatattcattgtctacagccaaaatggaagagagattttccctatttttttccttggtaactagcattcctggctaacatactgaaactccatctctactaaaaatacaaaaattagctgggcgtggtgtcgcgtgcccatagccccaactactccagaggctgaagcagaagaatgcttgaacctgagaggcggaggttgcagtgagccgagatctgacactgcactccagctctggcgacagagcgagactccgtctcaaaaaaaaaaaaataaaaataataaattgaggaacatggggtacacttgaggccttgcttgagacacatgtggaaaatgccagggaaaatcagtccgctgtggcgtgtgaaaataattaagtggcaggcaattagactgaagaagctctagtccctggatttctacctcaaaaaaaaaaaaatctaagctcatgtgcattttttgggaaattactacattaggggaaacaaaattcaggcttaagcaactataaactgccaattaaactgtaattacataaccaggaattttttttttttttttgagacggagtctcactgtcgcgcaggctggagtgcagtggcaagatctcagctcactgcaacatccacctccggagttcaagcgattctctcacttctgcctcccgagaagctgtgattacagacatctgtcatcacacccagctaatttttgcatttttagtagacatggggtttccccatttgggccaggcttatcttgaagtcctgacctcaagttatccgcctgcctcggcctcccaaagtgctgggattacaggcgtgaacgactgcgcccggccccataaattttgaatagcagaaaacagaaactgtgaactccacggaccaaagctcttcccattcatgaacctgcaccccgagtcaggattctcccctgacgaccctctggtggtccctgcacattctgggagagacgggaggctgcggttgcagagctgcccacggagcgctccaggccagagcagtcactacgcagggaagacacaggacgccagggggcccggctgtcagcgtagccgccaaattatggctgaacgggactgaggccgagctgggcaaggagaactcagggtgcagattgtggagctgactgcgcagaggcctgagtcccgccacagccacttcccaccggttccaaccagcctatccccctctctcgggatgtcggaccggcactctcaccatttctaggcttccaggggctcccgggcgtcttagctgtggatctcccaatacctgcaggacacagggccacagaggctgggcctctaggagcagaggacacacagcagtgaagacaagacctggagctccggctgcagagacaaaggccccgcaaaacccggaagccttccgcttcactctggctgcgtgcctgattggacggcttccagcccagcgtccctgattggataatgcttaaatccccgccccctcaggccctgagtgacagaagatatgatcagatgctgggttaagtgaacaaagagtgccagcctaagcagctggcttttcaaacagtgcttcctccctgagctgagccaggcccaccccagagcatgggaatattttatctcttgtttactctctttcttgttgaatgtattaaaaaggtgaacagaagtattttgctgtcattaataatacataaaatttttgttcaacagaaaatcaacttttactttggtaatggtaaaatctattaaagctaattttaataaaaccttataaataaatcaaatttgtcatttttgagcactccagatttacatatatattttgtaatatctcgtaattttaaaaaactatttatattttatttttgtccacattctttttattttttcaatttgaaacaatctttaatttccaacagctataggagatagaaatcatttagaggcaggcacggatagttcacgctggtaattccaacactttgggaggccaaggtgagcagatcacttgaggtcaggagttcaagacaagcctagccaacatggtgaaaccccatctctaataataactaataaataataataataactaataatataaaaagttacctgggtgtgggggtgcacatctgtagtcccagctacaccggaggctgaggcaggagaatcacttgaagccaggaggcggaggttgtgtaacagcccaaggggtttattttaccctttgcctagacagagccgattcatcaagacaggggaatttgtggaggaaaagtcacatattaaatctgaactcaattgaatgtggacacaaacaattgtcaccaagtcccagaacaggttgtgtgagcccctgaggtgttcatccagcgctgtattgaagaaatctctatttcaatctattcctatatattagttgttgaaaaacaatagacaatcacaaaaaaaggttgacctttttgtgttccttgaggcaagtcgtgaagggctctcatcactgggccttatgccaaacaactcgttacaaaagagctaaggtcccagaccgccctgaagcttcataagacctctccttgtctgtgtacgatggacgggtggctgactctagagctgtggctgttgcctccctctctggtggtgaatcccccatagtctggtgagggaaaatatatatatatatatatatatatatatatatatatcttttcccatttcctcgtcttattaagattggcttattacatcaatctgcttattatatttatttgcttattatatcatttgcttattatattattactttattatgtctgcattgccatttacgtgggataaaagttgtttacccttaatggtattgtgtgtgtgtctttgtttctcccctctcacatttgcctcacagaacatttttggcatcacaaataggatttgaaaacaaaagtgtacccctttttgactagaaggacagggctggagggctcagggacttcccatatcctgggatgggaactcccccagttctccctcttggtgattaaatggtcaaggggaactggtttttgtgggaattgggaatctaaattagtgcagtttaaacctttgactgtgcgggaagtgctgcgggggattccagtcagcaaaggagatgctgagggatctcccggagtggatggtgtttgcttactgcttataagttaatgtatcgtgataggggctggttgctacaagataaatgtaagcggaaaaggaaaatgctaatctgacttccagactggcccaatgccagtcaatgtcttgactgataaagctcaaagctatcagcctatcgctgaaaaaagcagctgtccaggtggcccagtcaggataaaactgaagaactagtcagccggggcttcgagcaggtaaaaacccagttcctatttcaaaaatgggaaattaaccctagtaaaattcaaggacctgcacaaagtataaaattccttggcattttatggaatgcaaataaatagtccattttaccaaaggctaaggctaaaatactagattttgcaacccctaccactaatgtactggcttgtttggtttctggagacatcatattccccacttgggtaacattttacaacctctgcatgcagccactagaaaacgctatgactttcactggggagagaaagagagcatggcctttgaacaagctaaacaagcagtgcaactggccctggatctatggcccatacgggatgggccagtagaactgcaagtaactgtcctagatcaatatgctaattggagccttgggcagaaacaagatgggaagagggtacttttcgggatttggacccagaaaccaccagagggaggaaaagcttatacctctttcaagaagcaactgttagcttgctattgagctttgctggaaatagaacacctatgcttcaaccatgatgtttttatgagacctgaaattcctattatgacttgagacatgagttcccccaaaacccaccagatagggcacacccaagaaagtagcatcatataatggaaatggcacatacaaaaccagcctaagccaaaaccaaagagggtatcactttcacatgaggatggacaaaacttgccagctcaggaaacactgaacgagtcctgcagatagagaggtaaacacccccctccccaaccgcccatcaaatgggatcagaaacatacttggtttactgatggacccaccaaatacattggtgggacccaatgctggaaggctgtggcttataatcctcttaaatacataagcatttctgatgaaggaaggagtgggagcattcagttagctgaactggcagccatcctctgagctattcaggaggagaccagagggatttgtcacttgtatacgaactcttgctcagtagcaaatggtcttaccacatggatgccccagtggcaatgaaacaaatggctaattgggaataaagaggtttggcgagaacaatgctggtaaggtatctgaatcctggtgcacaacacataccactgtgttccatattgtttgttgttgttgttggttttttcctagccctgtcaccaaactgaagtgcagtggtgcaatctcagctcactacaacctctaccgcccgagttcatgccattctcctgcctcagcctaccaagtagctgggattacaggcacgggctgccacgcccagctaatttttttttttttttagactcagtctcactctgtcgctagaatggagtgcagtggcgtgatctgggctcaccgcaacatccacgtcccacgttcaagtgattctcctgactcagcctcccgagtagctgggaatacaggtgcgcaccaccatgcccagctaatttttgtatttttagtaaagacggggttcatcatgttggccaggatggtctcaatctcttgacctcatgatccacccacctctgcctcccaaagtgctgggattacaggcatgaaccactgtgcccggccctgttttccatgttgatgttcatgcatctctgctttctcttgacagactatttaatcagcaggaagatcaacaggcaaaaatttccaccataactgcgatcttgaatgtgggtaaatggattacaacatgttcaagccttgcaatgagaggcattatagtgtatggtggtataactgatagggattaccagggagagttaaaggtcattttatacaataacactccagattcttttgctataaaaccacagatgcttgttgctcaattgttagtggtaccttgtgaacaattaacccctgaggaaatctttgtccaacagagtctacatacagaactgggggattcagatcccctggtacaggtagcttaaatcctggagtcaaaatatgggtacggcgtccctcagatcccaaccctaaggctagtgaccttgtagctatgaaagcagaaaaggaaggcatagtacaatttcctaaagatgaaaaacaatatcatttcccctctgtttttgttattacagggaataacctatctactaatggtcagcacctgtgtctttgtgtctgaggccaagaataaattcatcaactttttagccaccgctgcaacagaagccaaccacaatcaatgttggctatacgtcgagttgcaggaggatgccaaaaatggctaccttggagaatcatccctgacaacatttctgaatggctatattgttaccaatgggccacaacaacaacacttgcaatccaacctgggcttcctttgaccacactaagcgatctatctttgccaagtcagacaaaaggcgaactcctccctcaccttgcatcaaaagccttggtattctgcccaatattcctggaatggtatatactacaaacctgctgtgctggtggctggattccatacaacctctgctttgtctggaggccttaaatggatcctctaatgttactctggggtttctccagtcacgtgtcaacacatactccaaatcaacaacattatgcccaatgaaacacaatctctttcctatgttaataagagattagtacactatgattacagtagctccattgctgtcccctggggggccctctgggtatgcagatcctatgggtggcgatacgtgcccctactttggatggggagatgcacttgggggtggacattaattccattcactatccgggaaaatactcccctctccagtaatctagatgcttagaaacattgctagttacaaatgtgctggactccctggtggtggtaccctatcacagtattctcccctgccactggtacaatcttgcttcaccaacaaattataatacttagcttacctgtagaaaatgctcttaatgctagtagcactcgacttatgttgttaccagatgaatttgctcagctgcatactgttgtgttgcaaaatcaaatggcattagatatgcttaccacagcccaaggaggggtttgcgccttactgcatactggatgttgtgtgtatattcctggcaagtctcacaatattactctgtttgcaatgccatgttgggtctaatttttattaattgtgcttctaattctcctgtgcttaccctgtatctgtaatctatatcaactataccttcccgatgtatctgtgagggtattttaatacaattgagtatccaattgaggccgaatgtagtggaaaagttaaatattaaatttgaactcaattgaatgtggacacaaacaatggtcaccaagtctcagaacagattatgtgagcccctttaggcattcatccggcgctgtttcagagaaatttctacttcaatctattcctatacattagttattgaaaaacaatagccaatcacaaaaacaggttaacctttttacaggtgtgagccaccatgcctggccttggatggggtttttgtggttacttttttgttgttgatgctgttgttcctttctgtttgtttttctttcaatggtcaggtctgtcttctgtagggctgctgcagtttgctgggggttcacttcaggccctattcatccggttcactcccgtgcctggagatgtcactcaaggaggttggagaacagcaaagaagagtctgctccttcctctgtgatctctgacctcaagaggcaccaacctgatgccagtaggatcactcctgtatagggtgtctgacaacccctgttgaagtgtcaccagttgggtggcatggggagcagaacccatttaatgaagcactttgactgttccttggtggaggggggtgttttgctggggggaaacccactcatctgggctgctcgaattcctcagaactagcaggaggaaaggctaagtctgctggtccacagagactgcagcctcccctccccctaggggctcaggcccagggagatcagagttatgtccctgagcccctggctggagatgttggagttcctgcagggaggccctgaccagtgaggagagatgggtcagggtcaggcctgaagagacattctggccacagtctgccacagcccatgtgttgggctgtgggggacacctcttgagaccaagctgtccagttttcctggatctagcagaggaaaagtgaggccaggagctatagagatggctgcttccctttccccatccagggaccttagcctgttaggcagtttcgagtcccagtgctggctgctgtccctccctcaaggagctcaaacagcttagacagcagccaactgcaacggtggtgctggtctcccccaccgtgggaactcggcaggcttaagcagattctacctgacaggctgttcataatctgctcagctccagggctgtgtcaggcataataagttcctcttcaaagggtaacttccttgttgtttgttctcaaaatcaacttccttataccttcccgctcctagctacctgctatgtaaacatctcttctccccagtcgcaatccgtaatccacatctcttccttatttggaagaagtcctcctcactcctagttacctgctctgtaaacaaccttcctgccagtctcgatttaaaatagccgtcgagttagctccagccaatgggggcagcacgcagaagtagggactgtgttagggataaaaactccttccctcccttgtatgctgtgctctcacaacagccagagacatgactggcacccttctgcagaagtaaatttgccttgccttgccttgctgagaaattccttgttttctttgcgactctgagctcttgtttccaacagttgggaccttaggctccagtggcgtgggttcatgagtggaatcttctaatctgtgggttgcatagttccatggaaaaagcacagtttcccaggatgggtagcaggctcactcaccgcctcccttggctattgggcaagggctccccaggcccatgtgggtgtcaggtgggctgccacaccacactgctcttcctctccatggatcacgccatccacctagtcagttctgatgagaggacctggatacctcaggttatggtgcaggattcacatactattatggttcttttctatgggatgctgcttctagtcagccatcttggccctgccaccaccaatttttctttgaaaggctaatagaattcagctgtgaatccacctggttctgaacattttttttggttggcaattttttgaaattatttcaatctcacttcttgttattagtctgttcagagttgttgttttttaacctaggagggttgtacatttccaggaatttattcatctcctttaggttttctaatttgtgcacataaaggtgttcacagtagccctgaatgatcttttgtatttctctggcattggttgcaatatcttctgtttcatttctaattgagcttatttggatcttatctcttcttggttaatgctgttaatggtctatcaattttgtgtatcttttctaagagccagcttttcattgcatttatcatttggattttttgttgttgttgttgtttcagtttcatttagctctgctctgatctttgttatttcttttcttctgctgggtttgggttttcttgtttctctagttccttgaggtgttatcttacattgtcagcttatgctctttcagactttttcacagaggaatttgatgctatgaactttcctttcagcaccacttctactgtatcccagacattttgatcggttgtgccattattaatgttcagttcaaagaatttttaaattttaatcttgatttcatccaatgatcattcagaaacagattgatcataaatttaattttttgtttaatttccttgtatttatttaatttctaaaatgtatttaattttcatatatttgcatggttttgatagttcatttagagttgattttcaattttattccactgcagtctgagagtagttgatataatttgcattgtcttaaatttattgtgacttgttttgtggcctatcatgtgtctatcttggagaatgttccatgtgctgatgaataaattgtatattctgcaggtgttgggtagaatgttctgtaaatatttgtcaagtccatttgttctagagtatagtttaaggccaccgtgtttttttgtttttattgttgactttgtcttgatgacttgtctagtgctgtcagtagagtattgaagttccccattattattgtgttgccatttatctcgtttcctaggtcttgcagtaattgctttatgaatttgggagctccagtgttaggtgcatatatatttaggattgttacattttcctgttgactagtacttttatcattatataatgtccctctttgtgttttttattttttacctgtttttgctttaaagcctgttttgtctgatgtaagaatggctactactgcttgcttttggggtacatttgcatggactatctttttccaaacctttaccttaagtttatgtgagtccttatgtgtcggttgagtctcttgaagacagcagatattttgtgggtaaactcttatctattctgccattctgtatgttttaagtggaccatttaggccatttacattcaatgttagtattgaggtgagaaggactattctattcattgtgccagtagtttcctgaataccttttatattgtgttattgttttataggccttgtgagatttatgccttaaggaggttctatttcagtgtattttgaggttttgtttcaagacatagaaccctttttatcagttcttatagtggcggcttgttagtagtgaattctctcagtatttgtttgtctggaaaagactgtatctttccttcatttatgaagcttagtttcactgaatacaaaatttgggctgatacttgtcttgtttaaggaggctaaacataggaccccaatcccttctagcttgtagggattctgttgagaaatctgctgataatctgatatgtttttctttataggttacttgaggcttttgtctcacagctcttaaaaatctttcctttatattgacttcagataacctgatgactgtgtgcctaggtgatgatcttcttgtgatgaatttccttggtgttctttgaacttcttgtatttggatgtctagatctctagcaagtccaggacagttttcctcaattacttcctcaaataagttttccaaacatttaggtttcacttcttccctgggaacaccaattattcttaggttaggttgtttccataattccaagcttcttggaggtttggttcattttttaaattcttttttgtcttcgttagattgggttaattcaaaagccttgtctttgagctctgaagttctttcttttacttgtttggatctatttttgtaattttctactatgttttgcatttctctaagtgtgcctttcatttccagaagttgtgattttttttttatttatgctatctatttctctggtaattgttttcgtccatatcctgtatttaaaaaaaattctttcagttagtatttatctttctctggtgcctctttaagtggcttaataatggaccttgtgaattctttttctggcaattcagagatttcttcttggtttgcatccattgctagggagctagtatggtctttcaaaggtgttaaaaaatccttgctttgttgttaccagattgtttttttggttccttctcatttgggttttctatgtcagaggaaagatctgaggctcaaggggtgctgttcagattcttttgtttcatggggtattcccttgatgtgatggtctccccttttcccttgggatggggcttcttgagagccagagtgcagggattgttattgctcttctgggtttaaccacccagtggagctactggtctctgggctggtactggggagtgtctgcaaagagtcctgtgatgtgatctgtcttcaggtttctcagccatggattctaccacctgctctggtagaagcagcaggggagtaaagtggactttgtgagggtcgttggttgtagttctgtttagtgcactggtttttttttttttttcttttgaatgctagttgttctagcagtgaagttgtcacgtggaaagactgaggaggacttctggttagccaggatgttacaggtgatggaattagctgttgttttctcctttattggagtggggattttttgtttgtttgtttgtttgtttgttttttgagacagagttttgctcttgttgcccaggctggagtgcaatggtgtgatctcggctcaccacaatctctgcctcccaggttcaacggattctcgtgcctcagcctcttaagaagctgagattacaggcatgcaagaccaggcctgtccaattttgtatttttagtagaaactggatgcagtttctctatgttggtcaggggggtctggaactcctgacctcacgtgatccgcctgcctcagcctcccaaaatgctgggattacaggtgtgagccacaccacctggatggggttgttctttgatgagttgctgcaatggcttgagttggttgacctccaacctggaggtgggattttcaatagagcatcagctgtcgtagtatgggggggatgcaagcttgccatcaggtcacctggataagtattcaggtttctcaggcaatgggtgggaacatagagctcccaagagagtatgtcttttgtcttcagctaccagggtgggtagagtaagaccatcaggtgagggcagggttagacatgtctgagctcagactctccttgggtggggcttgctgcagctgctgtggggttgggagtatggttctcaggccaatggagttatgtttccagggggattatggctgcctctgctgtatcatacaggtcaggatggaagtgaaggaaagccagcagtgacaggcctcactcagctcccatgaagccagcaaggccagtttcactcacaccctacccaccaacagcaccaagtttataaccagtccgtgagcagtactgagatcttgccccaggctataagcctccccattgagaaagcaacctgggctttcaggccccacccctcaccacctgccatggcttctgtgcccatatctgtgcttcccattcactgtccccgtgccaattttgccaaggaacattgacactaggtcaaaattcttacagaatttagctggaagtttccttctccctgtggcccttccccaattccactggcagcctgtcccaaggaccactgtgagataaagtcagaaacggcttccctgaggaccaagagtgcctattgggctattcccactgcttcttctgctttcatattttgcttggctctctaagttcatttcagccctaggtgaggctaaatccttctctggtaatctggattttcaggttttgagtatgtgtgtttagaggtgaatgttccatctcttacacttttggcacttgctatttttcagtcatctcgcagaggttgcagtggcaagccacttctttcaaagagtctgtgcattcttttggttttcctggtatgttcctatggtagttcttggagcaaaagttcatgatgaaagtctccacatgctgttcagtccatccaagtgggagatagaaggtagttctgtctcctagccaccatttgtttttcttttgccttctgagatagaaatattgattgactcttcatcacagatacaaaaaaaaaaaaaaaagatcagtgagcattctttctttattgttttaaacagcaatctactttttcttcgggctactgatttaatttctcattatacatttatttatttatttatctgtttcttactgcctgtgctcaccactagaccagctgcaaaaaattcaactacagaaatataaggtaagtatttcataaatgattctcattaactataaatccacaaaaatttcatgttcacattcatctgactggcctcatttggccttctacagaatgtttgaagtttgattaaaaataatctactgataaatatttattgatagaacactgaaaggtgaagtctactggtgaaaacattgttccttcattaccagaaatgaagtagatacatttatttcttgacttactattatgcttcattagtgtgtgtttatttttattcagtaccatgctatttgctttctgtagctgttttttgagacagatttcactctgttgcccagggtggagtgcagtggctttattgtggctcactgcagcctcaacctcacaggatctagggatcctcccacctcagcatctcaagtagcagaaactatgggtttgtgccattacactctgctaatttttgtattttttgtagagatggtgttttgttatgttgctcaggctggtctagaactcctgggctcaagcaacccaacttggcctcccatagtgccaggatcacaggtgtgagccactgcacctggccttactgtagctttgtaatatattcagagactaggtagtgtaatgcctatagctttgttgtttttcctcactattgcttaggttattcttggtctttcatgaattgataaagatttgataattactttttaaattctgagaaaaatataattggaatttttataaggattgcattaaatctatagatcactttgggtagtatggacattttcacaatattaattctttcaattcatgagcatggtgtatttttcaattttttagtgccttcaatttatttaattaatgttttaagagtttttagtgaacagatcttttgcctctttgaataaatttatttctgtgtattttattctttttgatgcttttgtaaatgagattactaatctcaatgcctgtctacacatctattcaaattcaacagatttagagatgaaaccaaatacatgtgaaaatgcaggagaggaaagaaattcaaagttttatagttttgtaaaatacaggtgcccaatttagcatcctgtgtcatgccctgtggtgacaagcatcgcattaagcttaaacttaagctcaaattgacttcttatttgggataacccaaagatagagaaactcatcatcctgattttacacaggtggagactgctgcttagaataaatgaatatacagaatcacatggctggtacatggtaacctggaacttctagaacaaaccatctgagcctgaacttgaaatgagctgggcagcttcttaccatctgtctatgaatagtccagagataccagagggtgccctttgagcctttggtgaataggtgaaaacttcaaatgttgatactcaggaggaaggagttagattgacccaacacttgatggaacacttatttttaacttaatgcagccataaaagtgtttataacacttggggctttgagttcttcaattaaggaagaatttctatagagtatacttttccctataaaatgtatttagccattgataactctatgtagctctgtgaaatatgtgcttattagacagatcaggtgttttggctatgaataagatgaataattgtgtttgaaataaaatatatttataaataattttgattctgaatatttaaaaactattaactactgtttgaataagtctttgtccaaaacatatatatatatacattttataaaatatatagaatatatgtatatatataaaatacaaacatagataatcatatgtaatatagatggtaatataactgtaccttctgtggctattatgagcttcactggtcaccagctctaggatatggggcatcaggtactcaagagtggcagcaagaaacgtaagcatggaagagtccaggcactgggcacagcagatctcccacaagaggtgtccaaacatatcatggagaattgcagctctgctcttgctaagaaggtgagtctacttttatttatttatttatttttagacgaagtcttgctctgtcgcccaggtgggagtgcagtggtgctatcttggctcactgcaagcttcacctcctgggttctagcgattctcctgcctaagcctcccgagtagctcggactacaggtgtgtgccgccactctcagctaatttttttgtatttttagtatagacggggtttcaccatgttggccaggctggtctcgatatcctgacctggtgatctgcctgcctcgggctcccaaagtgtttggattacaggcatgagccactgcacctggcctctttttttttttttgtgaccgagtttcgctcttgttgcccaggctggaatgcaatggtgcgatcttggctcacctcaacatccgcctcccaggttcaagcgattctcctgcctcagccgcccaagtagctgggtaggctggtcttgaactcccaacctcaggtgatctgccggcctcggcctcccaacctgcggagattacaggtgtaagccaccgcgccctgcttttttttttttttttttttagacagaatctcactctgtcgcccaggctggagtgatgtggcaccagctcagctcactccaacctctgcctcctgggttcaagtgattctcctggctcagtctcctgagtagctgggtagctgggattacaggcgtgcgccaccacactcagctaatttttgtatttttagttgagacgagttttcaccatgttggtcaggctggtctaggactctcaacctcaggtgattcgcctgcctcccaaagtgctgggaatacaggcatgagccaccgcacccggctcaccaagacctttaaatgccactggtgtcaacttggccatgataaagcctgggcctagaaatgcccatgattaaaatctggtcactctaatgactgaaccctctttttaaagaaactgtagctattcagttgactttttgttgtagacaaaaatgtgtcatcaatagaatattttgccctgtctagaggacaccgctacagattatcagactctagccagtactctttgagtgcttttacaactttttgtaagttttaggtcactgaaagacattcacaatgtcttgtccagtagagtgtcaattgtttcttctcttacagtacaataatatgagtctccctccattaacatatttatttaattatttccaatttatattgcttttgctgtacatttgatttttttttttttttttgagatggagtctctccttgttaccctggttggagtacagtggcacgatctcagctcactgcaacctccatctcctgggttcaagtgattcttctgcctcagcctcctgagtagctgggacaacaggtgcccaccaccacgcctggctaatttttgtatttttagtagagaccaggtttcaccatattggtcagggtggtctcgaactcctgacctcgtgatctgcctgccttggcctcccaaagttttgggattacaggcgtgagccaccgcgcctggccatttgactcttttttgtactggctctcatatcggctgattcctcagatgttaaataaatattttaatatgtgttcccatctttatgagtgtcacgaatttataatttttttaaaattatgttttaagcactttttatgtcacactgatatgcccaatggatttatctaccaaaagcatccaaacttctatgacagagggttacacagttgaacctgggtgtttttatttgaatatctaggtgactaaagcttcagtagaactttgtggactctgttttcattttagtttcaattttcctttcagctaacttagtgtttctgtgtttttctgctgcatttagagcatattacctagtctttaccattggcaacagtggcttgaagtttgtttataaaattatgtttatcgagataaaattcacataatatcaaattcaatatattaattattttcaggtttacacttcagtatctttttgtgtattcacaatgctttacaatcattagcaataggtaattttagaacagtgtaattacccaaaaaagaaaccccacacccatcaagcagccactttcaattttccccactggcctctggcaaacattaatccactttctgtttcaaaggatttgcctgttttgggaattttatacaaatggattcaaaaaatacatgaccctttttgtatagctttttccatcaagcgtaatgtctttaatatgtatccatgttgtgtgccatattggcacatcattcctttttctggcggaatactattgccttgtatactacatcacatttgtctatctagtcctccatggataggcatttgcactgctctcaccttttggccataacaaataatatttctacggacacgcatatacttgtttttgtgtggacctattttgatttccgttgagtatatactcagaagtggaattgctaagccatgtggtaactctatgctaacctcaggaggaactgccaaaatgttttccaaaactgctgcctaattttgccactgcaccagcactgtatgaaggtttcaatttccccacatcttcacccacactgatctgtcttctgaaatatacctgtaccagcaggtgtgaggtgatatatcactgtggttttgacttgcatctttctagtgaataaagatgttgtgcatcttttcatgtgctcattggccacttgtacagaataaaaatcttggagccactggtccagattatgagtctcaaacacatgttacaaacagatttttgatgctgcacaagaaatagcactcagcaaggcaaatttacttctatagaagggttcacctagtaaattaagcaatgacaagggcgcatagaacaaaggaagcaggagtttttattatctccggtgcagcttctacctgtgtctttcccctattgcttaggtttggaccacacagtctaaactagtcctgattggttaaatacttcaaactttttagatatggtaatcatgtaagggaggtaagagagaatggaggtccattgggggggaactaggaaagcaacctgttccctaataaggaaaataatgcagattgggacttagattgtagcaagttcatgcatgtctaggcatagttaggtaagttggggcacagttgaggtaaggaatagttggaattatagaatagagaatggggaaactggataagctatttgaagagggaacataactgtgtcaaacacaaacaccatggaatgacgataatgttgtacatagtaatctggtaattctgttattatccaatgaagaacagtatcttaaatcttttttctttgtattgtttttgctgtccaatttgccaatcacatgcatagaaaaaatggtatttgtcagtgtatttcctatccaggacaagatgttggaggacccaatgtatttgggagcttgtagtctcaactgtgcccacctggagttcatggggctgataatgatggctggaagacactcaagaggcagatggtggtaatgtacacacctctgcccactctgtgaacatagaaaacatgtttgcatgcactatcactgaggaaatgcttgaaattaaaagaagtcattgtctgtgaagctgctttggagaatatgaccaagatgttggctatagccaggtgcttgagaatcaaatctgtggactttaatatccacctggtataacaaagtggcaaaaaaataaattccccaataatccaactgttgtctgagaaaagaagattattcctatttccaaattcctggaggccattcattattttccaattactaatatttttattcggagtgagaatattctgcataggcacataaggtctgttttattgtggcaactaaaaaggattattgttcacataccactgttttcaacttataattttgtttttaaattctacttttctttcactaagatgtttttctattatctctatatatacatatatatacacacacacataaattcataaacacacacacatatatgtatatataaattatttgcatttagcctgtgctttttaaaataaattccagtggttgacatctagctcacatgttgtcaggcattttccattttagtaatttaattttcatctatattatttcattgaaatacacttgaatcaaatatgaaactttaatatgaaagattccattggcttttcttgcaaaaacctttaatatgaaagatgccattggctttgctttattattataactatatatagtgtgataactttatatatatatagcattataaaactactatatttgtgtgttacatataatttttacaacaactctattaagtggtttattattctgattttacaggtgaagagagcttagacaaaaatagaaaaaatgacatttccaaaattaccttcttgtaggaggcagtttcaggagttgaagatgcttttaactattatgctgtctcaatatcagatatatttttttaaaaaatccacgtattttaaaaacatttctgtatctcttgttagttttttaaagaatgtttgtacatatttatttaaaattgcaatatgaaatattaaaatttaaatatgattgcataatttattggcaaatatctataatgattcaaagattcaagtagaatattaatgttctgatttagcatcatcttaagtggaatttatcgaatgcaaaaattatttcctcttggaattaaaacagaagattttttcaacttaaccaagaaggagacataatggaatggctattaagaaaaggagcttgaggctgggcactgtggctcacacctgtaatcccagaactttgggaggctgaggtgggtggatcacctgaggtcaggagttcaagaccagcctggccaccaggcaaaaaccttgtctctactaaaaatacaaaaattgggccaggtgtggtggctcacgcctgtattcccagtactttgggagcccgaggcaggcagatcacaaggtcaggagttcgagaccatcctggttagtatggtgaaacctggtctctattaaaaatacaacaattagccgggcatggtggcatgcacttataatcccaggtactccggaggctatggcaggaaaattgctggaagctgggatgcagaggttgcagtgagccaagatcaggccgctgcacctcagcctgggcaacaagagcaaaactccgtctaagaaaataatatatctctctctatatatatttatatctatctatatctatatatttatatctatctatatctatatttatatctatctatatctatatttatatctatatctatatatttatatatctatatctatatatgtttatatacgtatatctatatatttatatgtatctatagctgtatatttatatatctatatctatatatgcatatatctatatctatatatttatatatctatatctatgtatatttatatatatatctatatatatttatatatctatatctatatatttatacatctatatctatatatatttatatatctatatctatatatatttatatatatctacatatatctatctatatctatatctatatatatctacctatcaagtaccatgctcactacttgcctgatgaaataatgtgtacaccaaaccccagtgacatgcaatttacccatttcacaaacctgcacatggacccttgatcctaaaatagaaattggaagaaaacagcacaaataaaataagattcagaaattgagtatataaaacaacaacgattttaaaaacagctttcttgcttttctaaaatatggatgttaatagatgatctggatcttcagccctcatcttggaccatgaagaatggaaaacgaatgtcaggggtgatggagcagagacatccctaaaggcttcctgaagctgccatgctggcccaggtatgcctaactccccagtttttatgtgaaaaaaaaataatttacgtgttttaagtcagtatgaatagatctcaattattaatagctgaataaaggaaaatgagctgttgaatatgaaaaaaaaaagcgatattttgaaaaatttgctccagttacaatttaccaataacaattacagctctttgccaggtgtggtggctccctcctgtaatttcaacactttgggaaaccgaagcgggcagatcacctgaggtcaggagtttgagaccaacctggccaacatggcaaaacaccgtctctactgaaaacacaaaaattagtcaggtgtgatggtgcatgcccgtaatctcagctacttgggaggcagaggcaggagcatagcttgaacctgaaaggtggagattgcaatgagccgagatcatgccactgcactccagcctgggtgacagagtgggactccatctcaaaacagaaacaaacaaacaagaaaaactgttacagctctctagtgttcccagagaaatgaaggagtttggaacaggcttttctcatctatgatttctgaagaaagaaagaggctcacatggagagagcagaaaatgctgagtcttatatacgaagaacagacagtgaagtcagtgtgtctttctgggttctgcgcttccttaagatgatcctctgctaaaaagcaaactttttgtgaatcttcaaattcctgagcaaaactattctttaatatttaatcaggaaatgtgattatataaaaagctggaggccaggcacggtggttcacacttgtaatcctagcactttgggaggccgaggcagacgaatcacctgaggtcaggagttcgagaacagcctgaccaacatggagaaaccccgtctctactaaaaacacaaacaattagctgagcatggtggtggatgcctgtaatcccagttacttgggaggctgaggcaggagacttgcttgaacccaggaggcggatgcagtgagcggagatcacgccattgcattccagcctcggcaacaagagcgaaactccatctcaacaaaaaacaaaaacaaacacaaacaaaaaaagcttgagtagaatatgtgaaaggttacagtgcaaataaataactttgaatttaaatattgatataaacataaacatataaacataaatggggcaaatatgtgcaatttacagagatgtatctcaaagagttattctcacacagaaaaacaccaactttatatacttgagagataaattctacttattaaatagttgataaactgatgctatctagactgttcgagagttttaatgtagtcaatcttcccgctaatgtgtaagtgttcataagagggatatgagaactttgcttaagagttctcatatatgagacacatatagaatattacagacatatagaacatataagtataatgtaaaaattttaaatattagtagccattgtgtcagcgtactaaaacatataattatattatgatccagtgtactttatgccagaaatggaagtgagatttaccatttggaaatccactaacaaattagtcaaataattgaaaccaatagaatgtcatgtttcatgttcatagatataaataaagacattaccagaattctacagaaaagtttatatatatttatatatatacttaagatatatatatatatatattttttttttttttttgagatggagtctcactctgttgcccaggctggagtgcagtggtgtgatcttggctcactgcaacctttgcctcccaggttcaagcaattattctgcctcagcctcctgtatagctgggactacagatgtgtgccaccacacccagctaatttttgtatttttagtagagacagggtttcaccatattggccaggtttgtctcgaactcctgacctggtgatctgcccacctcagcctcctaaagtgctgggattacaggcataagcaactgtgccaggcctagaaaatcatatttttaaaaaattagtaaggatttagcataaagtatttctgaaaaatatgaataacagatttgtacaagtaaaagtagtggcaatatatgtttgaaaaggatgattcaacagtattggatcaatgatcttttaatcagtttaaaaattgagtttgaatgcaacagagacatcatcttattgtgttctgaaaatagaaattttgctgcaaagaagaataaatgaataaagatattcataaaaagcataaaaaaaaagtgggctgggtgcagtggctcacacctgtaattccagcactttgagaggctgaggtgggtggatcaccaatggtctggagttggataccagctgaccaacatggtgaaatcccacctctactaaaaatacaaaacattagccgggtgtggtggtgcatgcctgtaatcccagctactttcgaggctgaggtaggagaattgcttgaacccgggaggtggagtttgcagtaagccgagatctcaccattgcactccagcctggccaaaaagagcaaaaagtgtgtctcaaaaaaaagtaaaaataaaaaagaaaagtgaagtgacatcttctatgatgtgttataaggaattgaaaagttaaataatgtagttttaatttatgaacagatttagagaccaatggaatataaaattcaaaaatagcatgaaatatatatgaaatgtagtgtataacagatgcagcagtagtgaaattgatgtgaggtcaatgtgtctccctggagactaaagcccacatatatgcagtgaggaccttgtctcccaatgttttatttttgcacatctgatgttttcacatgtgcagggaagaggtttaatatttgattgtctttggctatggtctgatggatcagtctctcctgactcaatacacactgtaacctgttctcagagttcacagtatgtctcttggtgaacgtaggtgttactactgtctgcaaaggttgaccatctacaacagacactcttgctctgtttgggaataggtacttattgtttcagtagttattttcagttggtaaattttctgggggactcccccatgcccttgtcccacatgaggtaattctcttaaagcagttcaggaagaacaactttgcgtagactctggaatgggctgcttcaaagtaggatactccacataacctatattctaatatgcaaccaacagaagacagtacacttttcctttttctttttttttaaaaaaaacttttggagaagataggcaaggcatggtgactcatgccaataatcccaggactttgggaggccatgacaagagtatcacttgaggccaggagtttgagattaggctgggcaacatagggagactttgtctctataaaaaaaaaaaaaaagaaattaatagggcatgttgacatgcaactatagtccctcctactcaggagtccaaggcaggaagatcacctgagttcttcctatgtaaatattaaaggtccagactgtgaacagatctgaagtgaggctacagtgagctataatcacaccactgcactccagcctgagtgacaaagatcttgtttataaaaaaaaaacttgaaacaaataaagattctttgttataacaaataaaactaatcttaagaggatgtgctataatgtatattaacagatgttttgtgcctatactgaaacttttgtttgtttgtttttaagacagaatctcactctgtcacctaggctggagtgcagtggtgtgatctcacctcactgcaacctctgcctcccaggttcagctgtaatcccagccactcaggaggctgaggcaggagaaataacatggtgaaagtaccaataaacatggtgaaataccacctctactaaaaatacaaaaattagcctggcatggtggcatatgcctgaagtcccagcttcttgggaggctgaggcagagggatcacttgaacccgggaggtgtaggttgcagtgatccaagattgcattactgaactccagcctgggggatggagtgaggctcttgtccttaaaaaaaaaaaaaaaatactttaatgaaagaaatcagaaggagcaaaaagtagaaagatacaccatgatcatgatgcaaatactccatattgttaagatgtcagttcctcctagcttgatctgtgatgcactacagccttaaacaaaattccatgaacttcttttggggctactgaaaaactgattctgaggtttatatatagaggcaaaaacctacatgtagaggcaaaagacctagaatagccaacacaatattgtaggagaataataaaattggatgattgagacactactcagcttcaagattaaatataaagctacagtaatcaagacagtgtgatattggtaaaagaatagacaaatcagttgatggaacgaatgcagagcccagaggtaagcccatattaatatactgaatgaatctttgacaaaagactaaaggcaatacaatgcagccaagagaatcctttcaacaaatgatgctaaaacaactggacatccacatacaaaagcatgaatcacaaacattacatcctcacaaaaactgacacaaatggaacacagacgtaaatttaaaatgcaaaactataaaattcctagaatgtaattaggagaaaatctagatgaccctggatttagcaattataatttagataaaataccaccagttcattttctgaaagtaaaatatcgatgtcaaatttaccaaaattaagcatttttgctctgtgaaagacactgtatagagaatgaaaagaaagacacagtatggaagaaaatatttgcaaaagatatatctgataaggattgttatccaaaatatagaaataattttcaaacaacaataaaacaaacgacctgactaaaaaatcaaaataaagagtgagccgaagacctcaatcaacaccacacctgagggcagcaggaatgaaataaccacaggtaaaccactgcttgctagtgttgcccacctttctttcagagaacagacagtgaacaaaggatgatggggccacagaagaagtaaactctatgtcttcagatctgttcacagtctggacctttaatatttacataggaagaaaataaaggcaaacttattttgctatttggccttgaccttaaaggccaggctgtggttatctgttttctcctgtggtgtgggaaactgagtgaatataagcaccaatcacatgcgtacatgtccacatgtccacatgtatttctgcatttattttatttatttatttatttatttatttatttatttatttacttacttactttttgagacggagttttgctcttgttggtcaggctggagtgcaatggcatgatctcagctcacagcaacctccgcctcccgggatcaagagattctcctaccttagcctcctgaggagtagctgggattacagatatgtgaaaccaggcccggataattttttgtatttttagtagagataaggtttctccatgttggtcaggctggtctcaaactccggatctcaggtgatccaccccaccttggcctcccaaagtgctgggattacaggcaggagcgaccacactcagcaatacttctgcatttctcaacattatcttacaagacatctaactttaaatagggaaaaatatcagtacttttacggtgctcagcgttagaaggtaactggtaatcaacctgtcattaaatcttggcattctatctgcactgggtgcatgtatcagttagctatgcagcataacaaaccatccaaaactgattagctcataattgaactgctcagccatttacgctggactcagtggggccattcttctgttctcagctgagctccttcagacatgtgtcacgagctgctcattgactaggaaggcagctgtgcttctaggggtgagcttctgcttctggggctgtcaacaggggcaccttgcttctcctccccatggtatcttatcctccagctggctaatataagcttgtttcatgaagatggcagcattctgaaagaaaaacggaagcagccccagcatggtggctcacacctgtaatcccagaactttagtaggccaaggcagatggatcaccttaggtcaggaatttgagaccagcctggccaacatggtgaaactctgtctctactaaaaatacaaaaattagctgggtgtggtgacacatgcctgtagtctcagctactcgggaggctgagtcaggagaattgcttgaacctgggagatggaggttgcagtgagccaagatcacgccactacactccagccttggtgacagagaaagactccttctcaaaaaaagagaaaaaagagagagagaaaagaaaagaaaaacagaagtagtcaaaacggtttgaatcttggccccaaactaacacattgtcatgttcccaggtttctactgccctgagcaagtaagaactgccagagcaagcgttaggaaaatagattctggatcttgatgggaatggctgtaaaagcacctgacaatggacgtgaatacaggagggatgaaaaattgctaccatatttgcagtcagtatccttctgctgttgtttgtttgtttgttttgagagggagtcttgctgtgttgccaggctggagtgcagtggggctattttggctcactgcaacctctgcctcccaggttcaagctattcttgtgcctcagcttcttgagtagctgggattacaggcccacaccaccacacccagcgaatttttgtattattagtagagatggggtttcaccatgttggccagggtggtctctatctcctgagctcgtgatccacccgcctcagcttcccaaagttctggggttacaggcgtgagccactgcacccagcccattctgctttttctgcatgtgtggcccacagaactcttccacatcaagaaattttccaaacacccacagctactaaatggctgggctgggactcaggatcaactctgtctgactccaaagcctatgtacctccatggatcacagtattcaagtagctgtcctagactcttaaaatcctggagagtgacacttcaaaaatagaaaccagattgcttttagatttgtgcccacatagtactgtttattgttgggaataatctcaagaaattactgaagcacatggtggctcacatctgtaatcctaacactttgcgaggctgagatgggagaatcactgaagctcaggagttcaagtgcagcctgggcaacatagtaaaatcctgtctcaatataaaacaaatttaaaaagttaaccaggcatgatgatgctcgggtgtctagggtaggaggattgtttaagcctggaaggtggaggttgcattgagccatgattgattacaccactgcactccagcctgggtgacagagtgagactctgtctcaagcaaaacaaaacaaaaacaaaaaaggaattgcaaaagcattttgaaagaacatagaataacttggaaaaaatagctgacatagctgatattgaataacttggaaaacataacttattttagataatcaaagcccaacaacacatcacttatttttttatcatacaaaacatttgaaaacttttaaaagaaaaaaacttcagagaaattaagtttaacatagtttaattgagcaaagaataatttggaaattaagcagcctgtggtcccaaatagcctcagagagactccagcacagccacatggaaaaaaagatttatgtacagaagaagcaaagtgacattcagaaaatagaagtgaggtacagaaacagccggatttattacagcttgggatttgccttatttgaatatggtttgaccagttgatgttcttttattagcaaaaaggtagtggttggtacaagaataagttacaatctatttacatattcagctatgttttagtttactatgtacagaaaatcctattaaccaaaattaaacaaaaggggtcagctttaggctttaattaatttaacaatatctcccttttggttatctcctcattttcaagaaataaaccaaaactttagacattgatattactttgtcaccattacaaatgtacttatttagtctcaaattctgctataaaatagcagaactgtgggttttgtaaagtgaaaacaagtacttcaggttattactttttaaaaggattacagtagggaagacctccttgtttgaaatctgctgtttaccaaagaaaaacaagacctggccagttttagcatctacctagttctttaaattttcagtttgactatgtcacatttagcatgaatgactccattttggtttggtttggtctgtttgggcctagtgaacaagctcagtccagaatgatggcctccaataattttgtttaaaaaatttcccccttttgattaagttttcacataggtcagagtgtgaccaaaactcagggtcttagtgtcactctcagtttccattatttttggtttccgttcttatcaggtcattcatgggttatggtgttctcatggtcaaatacattttctagttttcatcattccagttaaagagagaccacttgacattctagagatgactgcatgcaaagatttataacttttgagagaatagagtgcagtagggagactattattttgactatcaggaaaataatatcaagagttagaagtatgctttttttttttgagacgaagtctgtcttgtcaccgaggctggagtgcaatggcacaatcttggctcactgcaacctctgcctcctgggttcaggtgattctcctgcctcagccaccgaagtagctgggattataggcatgtgtcaccacacctggctaatttttgtatttttagtagagatgaggtttcaccatgttggccaggctggtctcaaatttctgacctcaagtgatccacctgcctcggcttcccaaagtgctggcattacaggtgtgagacaccatgccaggcctgaagtatgctttttaaccaaggaccccatgaaccaaccaatagatcaaataattagctagttaaatggtctactcatttcaaccagtctgttcattaatttcctacaactgaatctctgtaatactcgatgtatttctccatgtgcaactacaaatactagcaactgcacagatacttctctgtttatccagtaagtaaactagataaattcttttatttaacacaactttagtaaaaaaaaaaaaagtcttccaatgactttttataaaggtcaacacattttttccactctaagtgcatctatcatcagttgcaattacaaaagtaatctagtgaatttagttagctttgctcagtactattgtatccgtaatgccttatttaacagttttacaatttttctagtgaaataagtatctttgtaattggagaccttttcaaaaagctttcatgaagaaaaaaaagtcttagtatccttttagctaccgttataacatcaaccttcttgcatcagaaagcttttatactaccagaaaacatgcattaaaaatgacaattgccaggtgtgcaattttctgtccagtgctcacgtctgtaatcccagtactttgggaggctgaggcatgaggatcacctgagggcaggagttcgagaccagactgactaacatggtaaaaccaagtctctactaaaaacacaaaatttacctgggcatagtggcagccgactgtaatcctagctacatgggaggctgcagcaggagttgcttgaacctggaaggcagacgttgcagtgagccaagatcgcgccattgcactccagcctgggcaacaagagtgaaactcagtctcagaaaaaaaaaaaaaaaaagcacacctgtaatcccagtactttgggaggccgaggcagatggatcacaaggtcaggagttcgagaccagcctggccaatatggtgaaaccccgtctctactgaaaatacaaaaattagctgggcatgatggcacgtgctgtagtcccagctactcgggaggctgagttagaagaaacgcttgaacctgggaggccaaggttgcagtaagccgagatcttgccactgcactccagcctgggccacagagtgagactctgtctcaaaaaaaaaaaaaaaaaaagacaatttgtgtgtaaatgtttaaatgatggccctgaggtagcagaaacttacataaacttttaattatcttctgataattataagttcgacaaaaaaaaaatcagtcttaaactagtatagtaatttagaagtcactacacacacacacacacacatgcacatacacattcaatttatatttattatagattaatacagattacttatcttttctgtgatgagtagtgaaatgcagagtttttaataatggaaacttcaagaactcaggaataggaaccatatgcggtggcccacgcctgtaatcccagcactttgggagactgaagaaggtggatcatgaggtcaggagttcgagaccagcttggccaacatggtgaaacccatttctactaaaattacaaaaattagtctggcatggtcgtggccacctgtcatcccagctacttgggaggctgatgcaggggaatggcttgaacctgggaggtgaaggttggagtgagccgagatcatgccattgcactccagcctgggtgacaagagtgaaactccgtctcaaaaaaaaaaaaaaattactttaattaaaaaaaaaataactcaggaaatatcaagtggctgcctatattctccatgagtccacactgaacattaagtttatgtcttcttaaacactaggttactttccccaatttaggtgcacagcactgatacctgagaggttatcataggtcatttgacttggaccacagagttgatttaaaaagcatatctaaaacatttccgtactggctgatgtaactgaaaatgtggcagagtacttttgtaatagtcaattaatttttgtcttgtctgggctcgcaggtttttttgtttgtttgtgtttgtttttgttttttgttttgttttgttttgttttctttttgagatggagtttctgtcttgttgcctgggctggaaatgttgtgatctcggctcactgcaacctccacctcacgggttcaagcgagattgcgccactgcactccagcctgggtgacacagcaagactccatctcaaaaaataaaaacaaaaatttaaaaataaaagaaattaaaagctaattttcacaaaactttataaataaatccaacaaatatatcattttgaccactctagatttccatacatagtttataatctcttttaattactttttttgatagggagtttcactcttgttgcccaggctggagtgcaatggcgcaatctcggctcactgcaacctctgcctcccgggttcaagatattctcctgcctcagcctccggagtagctgggattacaggaatgtgccactatgtcccgctaattttgtatttttagtagagatgggttttctccatgttagtcaggctggtctcaaaatcccgacctcaggtgatccacccgcctcggcctcccaaaatgctgggattataggcgtgagccaccgcgcccggccttcttttaattactttttaaattttctctactttatttttttctacgttctttttattttctcaatttgagacaacctttaagtaatatcaaactagacaaaatatttttaactttcttcattgaaagcatatttttgcttttgcttgcacaatctctatgcaaaattgtttttcttagatccagtagttttaattatatatattaattacatgaactctttaaaacctaatttttagtgaaatctctagtaagtaatcttgaactgtttgatatcagtatttgtagacaaccattttatatttttaatagaagatgttttttcaaattctctgttaactagcagatctaaatatgtttagcttttctctatcatataaaaataagattcttgttgggggtagtggctgacgcttgtaatcccagcattttgaaaggccaagacacaaagactgcttaagcccaggaattggaggcaagcctgggcaacatggcaaaaccccatgtctacaaaaaatacaaaattagctcagcatcgttacctgcacctgtagtaccagctacccaggaggctgaggtaggagaattgcctgagcccaggagatcgagagtgcaatgagccgtgatgaagtcacttcactccatcctggatgacagagaccgttttttaaaaaattaaatgccaaagcatataaacttaatcttatgggacttcgggggtgggggtttgtttttattattctctcaacagctttgtggctacaggtggtgtctgactgcatgaaaaagttttttacgggtgattgcagagattttagggcacccatatcccaagcagtgtacacagtacccagtgtgtagtcttttttttaatttttgttttttgagacagagtctcgctctgtctcccaggctggagtgcagtgggcggtctcggctcactgcaagctccgcctcccgggttcacgccattctcctgcctcagcctcctgaatagctgggactacaggtgcccgccaccacgcctggctaatttttttttttttgtatttttagtagaggtggggtttcaccttgttagcaaggatggtctcgatctcctgacctcatgatctgcccgcctcggcctcccaaagtgctgggattacaggcgtgagccacagggcctggcaccaatgtgtagtcttttatcccttttccccgtaccgttgtttcccaagtctctagagtccattatataattttttttttttttttgagactcagttttgctcctgctgcctaggctggagtgcaatggtgcgatcttgcctcactgcaacctccacttcccgggttcaagcgattatcttgcctcagcctcccaagcagctgggattacaggcatgtgccaccatgcctggctaactttgtatttttagtagagacggggtttctccatgttggtcaggctagtcttgaactccccacctcggtgatccacatgcctcggcctcccaaagtggtgggattataggcgtgagccaccccaccccacccattatataattcttaagcctttacatcttcatagcttagcatacatcctcatagcaattttgcaatggcaaattctgctgctataaacatgcatgtgcaagtgtctttttcatacaatgacttatttttctctgtgtagatacccagtagggggattgctggatcaaatggaagttctatctttaattcatttagaaatctccagactgtttttgatagtagttgtactagtttatgttcccaccatcagtgtaaaagtgatcccgttgtactacatcaataccaacgtctgttattttttgattttttcattatggccgttcttgcaggagtaagatgataccacattgtggtttgtttttcagttctctgatcattagtgatgttgagtatttttttaaaacgttttttaaccatttgtatgtcttcttttgagaactgtttactcatgtgctaagcccacttctttataggatagtttgtttttttcttgctggtttgtttgagtttcttgtagaaactttgtcagtcctttgtcagatacatagtttgcgaatattttctcccactttgtgtgttgtttgtttactcttctgattattactatttttttctgagcagaagctttttagtttaattaagtcacatttattgatctttgtttttgttgcatttggttttggggttttcgtcatgaaatctctgcctaagcaaatgtctagaagagtttttgctatattatcttgtatagtttcaagttttccatttaagtctttgatccactttgggttgatttttgtataaagagagcaatgaagatccagttttattcttctagatgtggctcgctaattatctcagcagcatttgttgaatagggtgtcttttccctacttcatgtttttgtttagtttgtagcagatcagttggctgaaagtatttggctttatttctttattcactattctgttccattggtctatttgcctatttttataccagtaccatgctgctttggtaactatagtcttctagtatagtttgaaatcagataatgtgatgtctccagatttgttctttttgcttagtcttgttttggctatgcaggatcttttatttttctgtatgaattttaggattgttttttctaattctgtgaggaatgatggtggtattttgatgagaacggcataaatttgtagattgcttctggcactatgatcattttcacaatattgactctactcatccatgagcatgggatgtgtttccatttgtttgtatcatctttgatttctttcagcattgttttgtagtactccttgtagaggtctttcacctctttggttaagtatattcctaagtatattttttctgcagctggtataaagggtttgagttcttgacttgattctcagctcagtcacttggtgtatagcagtgatattgatttgtgtacattgattttgtatcctgaaactttactaaatttatttctcaaatctaggagctttttgaataagtctttagggtattctaggtatacagttatatcatcaacaagcagtgacagtttgacttcctctttaccaatttgtatgccctttattcctttttttgtttttttttttcgatggagtcttgctctgtcaccagtctggagtgcagtggctcaatctgggctcactgcaacctccaccttccgggttcaagcgattctcctgcctcagcctcccgagtagctaagactacaggcatgcaccaccatgcccagctgatttttgttttcagtagagacaaaatttcatcatgttggccaggatggtctcgatcttttgacctcaccatccacctgccttggcctcccaaagcactgggattactggcatgagccactgctcacttatactttgacttgctacatctttattctgtatgaatattaacagaattatagatagatctggatatagatatatgtaagtacataaacacacacatacaggattatattagtttgtatatgtaaatatttatgcatacaaaagatgttcatcaatagacatttctaattttccaccctaacctaaggacatagatgaagacttacttttcacctatatggctttataccatctcagactggaacacagccataaagtgttatatataaacatgaacaaacttcatgtttatgatcatggcctgtgaataaatattttggtagtgggatgtaaggctttatgtccagcttagcattttaggtccttacttttcttctcagagtatgcctgtattattcacatccattattttgagcctgccttgatgtctacacttttccagtttagctaatcagttgattatatttacctgagctgacctaattggatttttgcaatcacacaggctgagctaatttgcttatttaatttatctgggatgcaggggtagaaatgaagatgacctttgtcctaaatgggacatatgcaaaaataacctttacctatacatacatatgtgactcattctttgtgtacatgtttatctatcaacctatcttatatccatatttatatttacagaaaaaaaggcattgaagtaaacttggtaaaaggtaatttctattttctttacttccaggctacataaatccaatcagccgattagcacagtgaagatttataaaatccaagccaaaactttgccgcacttttttctttcataaatgtgaaaatgtccttcttacctggcccccaggtctttttatttctgaatctcaataaatcagcctagtgggcttctgttcaaccagttgaaaaagcaggaatgcctgacatcagtaagactatccttactcaggaagaagttttgaactggccaataaaagccaccattggcacttttgtgaatgttcactatgatctggttgaaatgcagcctgctaccatgtacaatcacatttactttcagtatgattgcctgtcttcgagaaagagtgctagactttcttcccattaccataaagacactacttcagtcacaaagacgaaaataccagttgtacttttacattacatactcataaaaataaactagatcacatgtcttaaagaaagccctgatgagaaaaaaaataaacattttacaatttagatgagaaccttaggactggggctggttgatctccggccatatgtccaacatgaagggatggattaaacttgacatggcagtgaatgacttccattggttagtgcatgttcattttccaaaagtgagcaataaagaccaatgcttccttcgtatatgttaaatgcagcaggatgtatgtcagtgcatacctctatagtgtacccttgtagatctagtttacagggcaaatatatttatacatgtatagaagttacttttcttggggggagggggatggagtctcgctctgttgcccacactggagtgcagtggtgcaatctcagttcaccacaacctctgcctcctgggttcaagcgattctcctgctgggactacagggatgcaccactatgcccagctaatttttgtatttttagtagagacggggtttcaccatattggtcaggctggtctcgaactcctgacctcgtgatccatccacctcagcctcccaaagtgctgggattacaggcatgagccactgcagctggccaggtaaacagatttttaaaacttacatacaggactatatgagtatgtctaggtaaatatttatgtatacaaaaaagttccccaatagaccatttttaatcacttggcatatacaaattatacagacatataattactttcaatctcttttgctcagtagcatttcagaatggagcatagccatacaatattgtttttataaacatgaacaaaacccttcaccttcagtagcacaggcctcagaaataagctgacagcaaagccatgttattcatgctgttcaggttggcacttcagggccctgcatttcttctcaatgtatgtatgtgcccttcacacccactagtttgggcctgctttgataaacctatagtcactatttagataattgtttgattggatctacctaggctaagaaaattggctgattggaatcaccttgcgctaatctaattggctaattagattcatctttactgataaaattggctaactggtatcacttgggctcatttaactggtgaattggaatcaccttgggctaatctaattagctaattggattcacctttactgatataattgactaattggtatcacttgggctcatttaattggctgattggaatcacctgggctgagctaactggcctactagaatcacatgggctgagttcattgactgcgtcttgaggagaatgagtaaggtaatgacctcttacatacttttcttttggggctttttttcaagacatactcacaaatagacattaattagacttatgtatataagccttagtttttatatgtgttttcctacatatatgtctcatatctgtttctaaatctacagaagaaagtttccggccaggcgcggtggctcacgcttgtaaccccagcactttggaaggccgaggtgggctgatgacccgaggtcaggggttccagaccagcgtggccaacgtcgtaataccccatctctactaaaagtacaaaaattagccgggcgtagtggcaggcgcctgtagtcccagctactcgggaggctgaggcaggagagtcgcttgaacttgggaggtggaggttgcaatgagccgagatcctcgtgccactgcactccagcctggcgacagggtgagactccgttttaaaaaataatcaaaaaaccaaaataacaatgcttactttatataagttaaatgccgatggatttaggtaatagtatacatccatttgggtagtattctaggtatatttcatagtgcagaaaattttatacatctatggaattatctttatatattaatattgatatcaataatgatcaacattttcaccttctacatcttcactttttatgaatatagatacaaagatggatacatctggacataggtagacagataaacatgcacgtacagaattatataagtacaattatgtaaatgtttatgaatatacaagatgttccacaaattatatttttaataccttagtatatactaagaatgcagatgtagacttactagtctactttatggcacagtaggaaccccaaatggaacatagccatatacaatgatgtttatagaaacataaacaatacttcactttcaaaggcaaggtctttgaaataagctgacaatacagcaatgtaatgctttatgaccagattagtatgtctgggcactgcttttcttctcagtgtagaaaagtgctttttacatccaccattctgacttaatgaatctacagtcactagattattggctgatttgatccacctgggcagaactaattgccttattggaatcaactaacatgagctaattggttaattagatacttctgaactgagctaattgactgattggaatcacaaggttcaactaactggctgattggattctctagaacctagctgatttcctgattaaaatcacatgagctgagctttctgtttagaatcgccgaggctgagttaattggcaaattagattcaccagggctgatctcattgactgattggaattgttaaggctgaactaattggctgtttgaaatcacctgggctgagctaatttactgattggaatcacctgggttgagtcgattggcaaaatgtaatcacctgggctgagcaaatttactgattggaattgcctaggctgagctaattgggtaaatggaatcacttgggctgagctatttggctaatggaatcacctgggctcagctaattggctatttgaaaacacctagcttgagctcattggcttattaaatttgcctgatgaaattgtattcatctatcttgaggagcatgagtagggacataacctctgatttacttttcatttgtgagtttttttgttttgttttgcttttttgacggagtctcactctgtcgcccaggttggagtgcaatggctccatccctgctcaccgcaacctccgcctcccagggtcaagtgattctcctgcctcagcctccccagtatctgggattacaggcacccaccaccacacccagcttcatctgggaaaaaaaaaaaaagattctatttctatgtcatgtatttgaaaacaaaagccctaaatttgagggaagctttaaaaagaattatttctcatttgcaaatttgtgttaaggccttcaagctgaggctagtttatccatgttttcacgttcaccagaattaaaaaggccatttttgacttggcaataaatgactctcatggccttagtacatttttgctaacagatgtgagcaacaaaaaccaattctttctttgaaagcattaaatgcagcaagatgcaggtcagagcatacctccacttgtgtgctcttacggataaaattcaaagggcaaataagattttgcatttattgaagtttttctttacattgctataagtacaaacacccatttatcctttgacctcttatacctttattctgtatgcatatggaaaaagtgatagttagatctgtatgtagatatacatgggtagacagataaacacacacatatagaattatatgagtttgcctatgtagatatttacgtatacaaaacatattaatcaatgaacattttaaattccccagcctacactgaggaggcagatataaacttactctcaactatatggatccatagcgtctcagactggaacacagccatacaatgttatgtttaaacatcaataaagcttcacgtttaggtgcatggcctgggaagtaagtttttggtaaagccatttaagactttagttccagcttagcattttcagggccctgcttcctttctcactgtatgctcatgtgatacatttgccatttgggtcctgcctggatgtcttcactttcccaagttagttaattgacttatattcatctaagcggctcattaaactcatctgggctgcagaagttgggaagaaaaacgacctctgacctacttattctgtggcttctctacaggacataagcaataatagaaattacattggtatacctatgttacccattttccatgtatatgtttatctagctgcctatcttatatatatatctatatgtataaaaaagactgccaaagaagagtaggttagaggtgatttttactttattgtccattcaggccgggtaaatccaatcagccattagctcagtgaagttttatcaaatccaatccaccaccaaatcacgttgtgctaaatgtgaaaatgtcctcattactgggcaccaaagtgttttaaattcagagtctaatcaaaatagcccatgtggttctgtccatccagctaggaatcttcagacatgccagtaggcctaattttttttcacaagctctggcctgaccaataagaacaacctttggtgcttcagtgcagtgtcattatcaaatgcagccaggtaacatgtaccattatatttgctttcagtatcataatcttctaataagaaacctaggctttccattatgataaagaccctactttagccataaagacaaaagggcaagagtgtactttcacattgcacactcgtggaaataaatgagaacccctgtcttgatgaaagtcttaatgagaagaaataaacattctcaaattttggtgagaaactttggactgagtctagttcaactttggccccatgtgtaacagaaacagaaggatcaacattgacatggcaatgaacgacttccattgccttagtgcaattttttttttttttttgagatggagtttccctcgtttggcccaggctggagtgtaatcgcatgatcttggctcaccacaacctccgcctcccgggttcaagcgattctcctgtctcagcctcctgagtagctgggattacaggcatgcaccaccatgcctggctaattttctatttttaacagagatggggtttcgccatggtgatcaggctggtctctaactcttgatttcaggtgatccacccgccttagcttcccaaagtgctgggattacagacgcaagccatcgcacctggccccttagtgcattatctcccagaagcaagaaacaacaaaaaatgcttttttcatatatgttaaatgtggcaggatgtatgttagaacatatttttatttgtgtaatatttgtgatattgtttatagggcagataaacttatacatgtatggaagttactttttttcgttttgtttttgtttttgtttcttgagatggagttgcactgtgtcacccaggctggagtgcagtggcgcaatctcagctcactgcaacctctgcctcccgggtacaagcgattctctcacctcagccctccaagtaactggggttccttcacccaccaccctgcctggctaatttttgtatttttagtagagacgaggtttcaccatgttggccaggctggtctcgaactcctgaccgcaggtgatctgccctcctccacctcccaaaatgctgggattataggcgtgaaccaccgcgcctggggggaagttactttttatcttactatattcatagtaatgcatatcaatacaaagattgatacatctagatataaatatacataagaagacaaacacatagagaattctataaatatttctatctaaatatttatgtatacaaaacacgttccccaaaagacatttttaatcttctaacatgcactaaagatgctgatgtagaatcattttttttctcttgctaaataatgtaaataacatgctaaatagaacataaccatacaatgttgtttatgtaaatatcaacaaagctttatcttcaagggcaaagccgcagaaataaactgagaataaagccatgtaactcatctgtccaggttagtattccagcaccctgcatgtctcctcagagtgtgtgtgttctgttcacatccaccatttggggcctgccttaataaagccacaatcactattcaaatatttgtatgattggtttgccctgggctgagctacttggctggttggaatcacctgggctatgcaaattggctgattggaatcacccaggctctgctaatttgcttatttaagttacctcagcttcaggggtagaatgtggagatgtcatctgacctactttatttctgaggcttttttttgagggacctatgcacaaattaacattacgtagacatacccatgtgactcaatttgtgtgtatatgtttatctagccacgtattttatatctctatgtacagaaagaagcctataaaataaacttgttcagaggtgatttccattttcttttcctacaggttaggtaaatccaatcagctacttagctcagtgaagatttattcaaaccaagccacatgccacatcacatttttttccataagggtaaaaatgtttttaataacctggcacctgggtgtttttaattctggtctcattaaacaagcgcagtgagttttttccatgtatctaggaactgccagaaatgcttgacacaagtgggctgagccttcctcacaaagatttgatctggaatataagagccacctgtgacacttcagtgaatgttcactatcacccatttgaaatgtagccaagtaccatgtaccattatatttgcttccatcatcaccatctgtctactaaaaagatctagacttcttttttattaccataaatacctgactcctgccacaaagacaaaaagataagactgtgattttacatcacacactcttggaaaaaaatagagttcttgtcttgatagaagttctaaagagcgggtgagagattaaatgactaccaggagctagataattgctgttttactaacaaatgttcattttcatttctatattatctcattatgttaataatgaagtaataacgtttatccagggaatttcaaaaaaacttattttttcatcagccataatagtaatcaaagacagagaaatggaggtgtttaactttcataatttatattttaaaattaaaatgcttctagaaataaaaaaggaaaggaagaaagaaatatacaaacaaatgaaagacagcctggtcaacatggtgaaagcctgcctctactaaaaatacaaaaattagtcaagtgtggtggtgcacacctgtaatctcagctacttgggaggctgaggcactagaatcacttgaacccaggaggtggatgttgcagtgcgccaagattgctgcactgcactccagcttgagtgacagaatgagactccttctcaaacaaaacaaaaaaataaacaaaagggaaggaagtggattactcacaatagctaaggtatggaatcaacctaaatgtgcatcagcaggtaaatggagaaagaaagtgtggtatatgtacacaatgcaattttattcagcccttaaaaataaggaagtcttgttatttgcaacaacattcatgaacctgaatgatatgctaagtaaaataagccagcacagaaaagagatggagtttccctcttgttgcccaggcaggcagtggtgcagaggcaccatcttggctcactgcaacctccgtctcctgggttcaagcgattttcctgcctcagcctccccagtacctgcgattacaggtgcccaccaccatgtctggttaatttttatatttttagtagagacagggttttgccatattggccaggctggtctcaaactcctgacctcaagtggtccacccacctcggccccccaaagtggtgggattacaggcatgagccactgtgcccagcccacataatccaacatctatgtaaagtgtgaaaaaaatttaaactcgccaggcacagtggctcacgcatgtaatttcagcactttgggaggccaaagtgggcaaatcacaaggtcaggcatttgagaccagcctgaccaacatggtgaaaccctgtctctactaaaaatacaaaaattagccaggtgtggtggtatgcacctgtaatcccagctactcaggaggctgaggcaagagaattgcttgaatctgggaggtggaggtagcagtaagccgagatcaggccactgcactccagcctggtcaacagagtgagactccatctcaaaaaaaaaaaaaaaaaaaaaatttaactcatagaagcagagaatacaataatgagaaaaaaaaaaaatccccctactgggttttggtctggttaagagagcttcttcatgatctttcagggattatatatgctttcattttctgcatccctctgttctccagtcaaagggtgaaaaaagatacagagaagacaatttgctttttacccacttcatttccactcactattagtcaatgtgggtatagctgagaatagcagttttctggcaggacagccacttctaagcaataaacaacacactgaaaataaagtataaatctttcataaaaagctaatgaattttaagaaaaacaagcatatgcatcagtaattcttggggtaaaataaagattcattttgttaatttctattgagttcccaaaatatttgatcaaaagctagcaaatatacaagagaaatggaatattattctaaataagaatattgtgaatggttattttgtcaatacaagtaaaaatatgatctcgcactaacagtctcacttagagttgtacaacatcaaatgctgtttttcatttaaaattgtatttcatataggtattcaatttatatcaccctcctttgctatttcaatcccttctccactttatatcagtggaaaacaggccagcaggtcccaggaaagcacatgttgctattgctgctttaacaatgatcatgaagagcacttgtttgggtgcgactcacgtgtcaaacactgttatttggcttaaagtgaggcagaagtttaaaaataataggtactgcatttgttcaccccaagaaaagtaaaagctaaggcccacaatgtggtaaggcaagagttaaaaagaaaagaacaagtttgcctctgcctagcagctcacttcaaggacagttagaagataatactgtctgaatagccaaggccaaaggaatgggctccagacatccacctccctttcagagcaaggttgaaggaaaaaacaaagagaaagataggttcttttactattactcttttcccaggcttcttaagcatgattatgttttacaaatgtctgtatttagccagttcttgtttttcttctaatgcagctacaaggccaccggctaggtcacaagttatattacgctatagattacgtgacctgtcactgtatgattaactgctattcttttgcttctggaatgctgcttctaaaaaccccactctgtctttgttcaatgctcagcttttggatgtgaatcctctgagccggtgcataactaaaataaacaagcccttcggtactccgtattggtttcttcattcctcaatttaccacaacatttttggtgaccacgaagggaccagagagggcaggcttactgtctcctttgcctctggggactggagcgtgagcctcgggaaacctgtggccccaggtgccactgggagaacttcagcccggaggggagatcagctgtcttttcacccagtgccccctacccagcagtgcaatagaacctaaagaggagctacaggacaatttcagaaacagcgtgcttcaggaagcacggtaaggttttgggggcccaaggcaggacctgtcccttggacagaaggggagcctgatcacctcctggggtatgccaaataatcggacccagaggggctcagggcaatgggagtggctcatcgattcggatgaaactcacaacctgctgacacaggacatgaaagtggttcactaagttgcctaggaaactggaggtggtgacagaggctcaccaccccaactgggaactagagggggcaagagtggctcgccacaccaactgtgaaactagagggggcgggagtggctcaccaccccagttatgaacatgggaactgaaaatgtgtgaaagtatgtgaatggaggggactaattaggctcatcagctgggaagtggggagtcacagatctctcagcgtggactgtgtgctccaagaaagtgtggggtcgactaagactagtggcaatctacatacagctaatagaaactgccctacagctcagagttgtagcgggaataaggacttctccaaagccaagcagcatctgaaaactcctgtagtaagagacagtgtagtcggctaaaatgagaggaagagtgagtgtgcaagagtgaatgtgctgcgtcgtaaagggaggagtgcgaggaaagtcatcaaaacatcaaaacttggcgtgcatgttacagaaccttaagaaaggttttgcaggggttatagagttaagattaagattatagagttaagattatagattatagagttaagttaaccccctcagaggttgagaactttctgtgaattagaatggccctcttttggtgttggatggcggagcaaacgaactatagacggaaaaattggccatgtatttagggtggtgacagggggtggaggactgccagtgtacccagatgaaattcctttatattgactcgtggttaaatataatatagacaaaaccagcatagatccagccctgtttaatggcttattgcaaaaaaagccaaaagtgaaagtaagagcagcttcactggcagatacagagttaaacggggagtcccagagaaagcaagagaagccagttttgcaggagctgccagaggaaacagaagttcttcctccatatgtcccagcctacccccctttaccgaggccaacagcccccccaggaacaagattcaggagctaacacgccccaggtctttcctcgaaggggaggatcaggcccttgagaggctagggaaggaagtcaagacagtcaagtgggccatttcagatctggccatgctcaagctgtgcaaatgcctctcagggagaagataggacctatctattatgatgaccagggccacatccagaggggggcaatggacttatatctatcagcccttttcaattactgatctactaaactgaaaacaccatacactgtccaacatggagaagcctcaagttcttatagatctgatgcaattcctctttctgacacacaatacgacctggccagattgcaggcagcttttcctaatgttgtttaacattaaagagtgccagaggatgacacaggtggctctccgctggctagaagcccatgcaccaacagacatagtgaatgctcaggcatacgctcagggtcagttcccagaccaagaccccaactgggacccggaggatgcaactcagcttcagcgtttgcagaggcaccgagaggcacttctgcagggcctaagagctggtggaaggaaagcaattaatataaggaagatttcagaaatgcttcagggagctgacaagagcccaagttagttttataagagactctgtgaagtattctgcctttatacctcatttaacactgaggttgctgaaaatcagcctgtggtgaatacagcatttgtaagccaagcccagggtgacatcaaggggaagctgcaggcatgaataccacccagtctataaaagtggccaaggtgtatgttaactgtgaccagggaacaatatgcaaaagcaacaagtgtggcagctaggcattccaagggttaactccctctccccagcccggctctatttggaacgagacgagggtggagactggcactgggagaagagcgaaggagaaggtaaggagaaagagtgtgagaagggaaagaagaaagtaaaacggaaatcagaaagaaacaggagagacagacagcaagcgtgtcagtagggtccgtactcttgcccagacccaccgctggctgcagaagcaggagaactcaggaaggaaaaaggaaagtaaattgaaagtttaagaaaaaggccagtctgttggcaacagctcttatggaaagagagattagcaatgtgagaggacttggacgtggacgcagacatggaagaagtcaagttaggcagaaattcaagagccggacaaggctggaaagagattaatgtatgagaagcaaaaagaaaggaccctggaaagatgaatgttcagaaggcaatgacggaaatggctaaggcagcgagacaaagaggccatcggtcaagggctgccgcacctttgaggaaccaaatactgatctgattgggctgccaggagctgaaggatgtaaagactaagacagatcgggcaccttctcactaggcttccaggagcccatggtcacattagaagttaaaggcattatcctcaggtttggactgtctctaactttaaagtcagacaatggactggcatttctagctgaaatagtgcaagatttaacaagactgttaaaaataaaatggaagttacatacagcctattagctgcaaatttcaggaaaaggtggaatgcatgaaccagacactcaaatagctactgaagaaatattgccaggaaattcatttgagatagaatcaggtgtttgcatatgatcctcctccaagtcaggtgcacccccaccaaacaaattgggtatttgcccagtaagattttgttcagtcaggcacccccaaatcaaaagtcaaattaaaggtgccctccagtaagtaggggaattaaccttaagaaagagatgcaggctttaggaatagccatacaaagtgtttagaattaggtacatgaaaatgcctataagcctgacacccctttaaatctggtgactgtttaggttaaaaagtagaatctaatttctctaggactcaaataggatgagccctctactgtaatcttgtccactcccactgctgttaaagtttcaggtgctgtgtcttggatccaccacagtcggctaaaaccggcagctcaggacaagtgaaccagccagcaggacccagatcatccaacctggctgatcctgaggcgagaccaagctgctgctgaggacaacagccctgctctggtcactccagaggctgaccagtctatgcatggctgaagcttgaggaaacaacaagccctgctctagtcacacaccagaagctgactagtctatgcacggccaaagcttgaggactcatcaagcaagtaaatgcagttagaaatcttaggactagtagttttactgtatactaactgtttgactgttgttctgtccctgtgctcaacctttttcccaggtgaggacctcttttgcccttgctggatatgaatatgctgtacattgttttgttgttgttactcctcttaaccattctagaataaacacctatagaagggtgtctccactgtacacatactacttgattagggaacagtataactagaaccctattgtactatacttatgagtgtacagggactcgattaggaacttgtacttataatcagaccacctattcaatttgtgacccaagaaatggtcagccttatatatgctgtgaccctgagtctttacctgggactcggttggagattcatactgagtcaaaggaaagaagttttataggtcaaacccaagcctctcttcctggagctatatgcatatactttgatatttgtcagttaacatctatgaacccaaactatctcacaatctctggtcctacagagtactatacaaactgccagtacaaaattgtgtgtgcaccctctgtttgtccttccaaggccctagcaatagcttgctggaactgtacaatgcagttcactgactgatcatcaccgaggtcaaagccaatcttgctcatcaaagtaccagcaaaactggattgtaagacaagcacttgcaatcctgtaagtcttactatcttaaagccagatctacctatatggactacaggttactccattgcattacaaagctatggtcaaaaaactaaaataactttgtatattctaaagaggactcaaaccaagcagtcagcccagcagcaattctgagtctttaagtcattctttgagcatataaaccagaagttaccagagcctcctcctttaggcaaaaacctatttgctcagctggctgaaaacactgccagcagcctaggcgtttcctcatgttatgtttgtgaagggactaacatgggagaccaatggccttgggaagtaaaagagttaatgcctcaagataactttactctgactgactcttttcccaaacagatgcccacaggttcaagcgtctggctcttaaaaacttctattattgggagatactgtgttgcttgctggggaaaggattttacagacccagtagaagaacaaacctgcttaggacagcaatattataatgaaccattaaggaaaactttgtggtgggacagagatgactacaaagcacatcatccaaattcgttctcccatttctcttctctaaattacacttggtatcaacttgcagctccaaatacttggcaagcacccccggtctttactggatctgtgggcctcaagcatattgacagttgccagctaaatggacagggggctgtgtgcttggaacaattagaccatctttcttcctgctcccactgcaacaggggaaaactttagggtatcctgtctatgatgaagttagaagaagaaacaaaagagatgcagccataaaaaatatataaaaaataggagattgggaagacatagggaagtcccctgaaagaataattcaacactatgggccagctacctgggcacaagatgggtcacggggatactgcactcctatttacatgcttaaccacatcataaggttgcaggcagtacttgaaatcatcatgaatgaaagagcaaatgcattagatttactggcccagcaaaccacaaaaatgagaaatgctaactatcagaacagattagctttagattacctcctagcccaggaaggaggagtatgaggaaagttcaatctaactaattgttgcctggaaattgatgacaatggaaaagcaattatggaaataactgcaagaatgagaaaattagcccatattccagttcaaacttggaaagggtggtccccagattctctctttggaggctggttttcatttttcacagggttcaagattttaataagggtggttctggccatactaggaactgcctaatactcccttgtgtcttacatctgcttgttagaagcattcaatcaactatagaggaaatagtagctaggcaaactaccacacagctcatgactctgtgtaaatatcaagctttgtctaaagaagaaaacttgtctcttcaggcagaactaagtaatagtgatgacttctattaaacttctttcataaaaggcatcagaaaggggaaactgaggcaagcatttaaaaataataagtattacaattattcactccaagaaaagtaaaagctaaggcccagaatgtggcaagacaaggattaaaaagaaaagaacacgttttcctctgcctagcagctcacttcaagaacagttagaagataacgctgtctgtacagccaaggccaaaggaatggactccaggcacccccctcccttccagagcaaggttgaaggaaggaaaaaaaaaaaaagagaaagacaagttattttactgttactcttttcccaggcttcttaagcaggattatgttttacaaatgtctgtatttcgccagttcttgttttccttctaatgcagctacaaggccactggctaggtcacaagtaatgttatactatagattacatgacctgtcattgtatgattaactgcttttgttttgcttctgaaaggccgcttataaaaaccccactctgtgttcaatgctcagcttttggatgtgaatcctctgagccggtgcacaactaaaataaaaaatcctcctgtactccgtattggtctcttaattcctcagtttactgcaataaaagtactgtttttctacttttttctaaatttacctgtaatataaaattgttagccaagaagactttatcttattcaaatatgttttatgggatttcattaagtgtctgaattatctggagtacttacattttccattaagctaaattgagtactacagataatctttaactaaaagcttttctgaggcagaataagatttgtaacattttattatcatatgaaagaagtgtattaaccatgttttcagtaatcactctgaacacagcattctcagttcccagtatgcaccctgagtcactcaggggaaactggtttctctgtaaagaggcagaagaaaatgctgagtggaggcaccacactgcacagcaatgctttccacatgcacctattagggtcttcatttaattgggctgatatttgcatagctacttactgaatttagtcatactatttttgagcagctaatggtgtctgttacctattaattttatacatttgctttttttgaaaaacaaatcttttgttaatttactctaagttgagactacatttaaaatgttcaatttttcagcgttaaagcaaatcagagaagagcaatgtgtatatagtgtgcattttcctatcaaaattctttattgcattggaaaccccaggaagccaactataaaatactccctttgaatactttagccaggattttagacttcaaaaggtcaaaaacaatgagcaaagtcaaaatcttgtttttatttcttgttagtcatctggccatttccaaaagcatgataattaagccaagtcattgaaaatatgcagttttgattaattttatcccatttggaatgttttctttaattgttttatcatgttaatctaaaagaaactgtctacataattatgctttcaagaattattcatattgtttacagtttaatcatttactacagtatagtaaaatcatttacaatagaattatgaattcattgtttttaaggtttttcaaatatgaaaacagttaggtatgatttgatgtaagttcaactctaggacattacccactggtcttcatggtatttctgtaatgaatagtataaaactaggtcgccagaatggtgcagacatgctgattgaattagaatgagttcagccttgttggtagactattggtatcccagaggctgatcattcactacagcttactaaatgtagttccataatgccagtgagcacttttacccaggttacctttttcctttcattaatgtggacctgttgtggtctcctgtttttcttaagctatcccaggtgagaggtgattatttcttgcatgaatgagattccctttttttcccctctgccataggatcctcttattctccctactggaagcaacatgcagaaggcaggaatgatgacaataaacaaatacgtttcctgccatgtggccaccataagcagcttacaacatggctcacctagaagtcacttactttcaggccagcaggggtgttttctatgatgtgtctctttctcttaaaagcacttctgattaagtttagcacaatcaggataatctccattttggtaaacacgaagtcaacagatgagtaacgtaatttcatgagtgatgtcccaccacagtcacacacttttttacactcgagagtattacacagcaggtgcgcaacagactgggaatccagggtattatcttaaaatgttgcctacccacctgaataaacttttaaaatagtctttctactgcttttgttatctacataaacaaaaatgtcatctgcaaataataactactttccagttttattcattacaaatattaactaacatctttttttctggcttaaattattattcctttatgtgtcattttatacattcacacacacatagaacaataaaaatgtatccaattattcaattttggttaaatttttattaaaataagcgttaaaaataattttttgagtgtgtttgaagagggcttttattgttgtactcaagagtgttatttctggagacaaagttgcctgtgctttaatacacggattctggggagaatccgagccataagccataaaattttatattaataaattccatacaaagcagaaagtatacatttgctttcagcatattcaaggtgtttagttttccattaatcacctaaaaacttattttgttccaataattgcgttttcttctgaaaatatgtacaaatgcatatttaccaaacactcatttcataattttcttacacctaaggtttatcttcagaggaatatgtgtatatttcactctatgaaaattaaaagtctttacgtttgcaggcagagtgaccacatgttcaaagaaactatataacaaatatttattaataatttttcaggactcagaaatgtaattttttttcctttgaggagtctcatcactctgtcacccaggctggagtgcagcagcacaatcttggctcactgcaatctccacctcccaagttcaagtgattctcctacctcagcctccaggtgtgcgccaccatgactggctaatttttctatttttagtagagacagggtttcaccacattggcgaggctggtcttgaactcctgagctcaagcaacacacctgcctcagcctccgaaattgctgggataataggcatgaggcactgcacatggccgtattttttctttttttttttgtgacggagtcttgctctgttgcccaggctggagtgcagtggcacgatctcggctcactgcaacctctgcctcctgggttacaccattctcccgcctcagcctctggagtagctgggactacaggcgcccaccaccacgcccagctaatttatttttagtagagacagggtttcaacgtgttagccaggatggtcttgatctcctgacctcatgatccacctgcctgggcctcccaaagtgctgggattacaggtgtaagccactgtcctggcttttttctttctttttgagatggagtgtccgtctgtcacccaggctggagtgcagtggtgctatctcagctcactgaaacctccacctcccaggttcaagccattctcctgcctcagcttcccgagtagctaggaatacgggtgcaccaccatgcccaactaatttttgttgttttagtagagagtttcacaatgttggtcaggctggtcttgaactcctgacctcatgatctgcccgacgtcgcctaccaaagtgctgggattacaggcatgagccactgcgtccagcccatattctatttatatttctgtataatttttattatgaccataaaaatcaccctgtagtcaattacaatttaattggacatttaaaagtaactaaaagtgtataattacactgtttggattagaaaggataaatgctagaggtgacagataccttatttaccctaatgtaattactacatattgtatgcctgaatcaaaatattctctataagacatatatacacatactatatactcacagatagtaataataaattaagaaaaaagattaaaaatttaactaacgggaacaatattcttcatttgcagtttactggcaaagtgattactagtgatgacattccactacataccaaatagtatacttcttccatcttttgcttacaccatttgagtaaggccggataggttaaagttagtggcataataatgcttcattaaatgcacaatagttttaagatggtaaaaaataaaataaaattaggctggacatattggctcacacctataatcccaacactttgagagcctgaggtgggtggatcgcttgagctcaggagtttgagactagcctgaccaatatggggaaaccccatgtctattaaaaatataaaaattagccaggcgtggtgtcacgcacctgtagtccccactactcgggaggctgaggcaggagaatttcttgaacttgggaggtggaggttgcagtcattgtgctgagactgcactgctgccctccagcctgggtgacagagcaagactccatctcaaaagaaaagttaagtaagtaaataaaatataagttaagttcacacatcatctaacaatttttaaatatattgcattttattacgtaacagtaaaattagtaaaataattgatatactttaatttataatttctttctctcagtataatgtagaaaagtattactctgaacacctaccttaaacattacttaatataggttaactacaatgagcctctccacttatattttcgtcatgcatcttacattttaatgtccttactgttttatagaaaaggtcataaagaatgcccaactcataaagaatctctaatatctctgatgcagcaacaattgatcacatactttcacgtgaatataataaagtaacagcataatttgaaagctgtattacatcattcacttttcaaaaaaattgttttcaaggaaacaaatatactttcaatgtaaatacaaagcttcaaaaaatctccttttaaagttatatactaatttatacaaacttatatacaaatttaacaactttagttgtgaattcatttatatactcaacactcttatttaatgtaatgtctgaagtgtcagtgccttagttattctgtaaattctgatatttacatacaattaattttgaattaaatattttttcatgtttactgcatctgcaaaaatatattttagtataaactctgctgttttctaagctgtagttttttttttttaaagtgtttccaaattcattacatttgcaggacccttctccaatataagttctctgatgttgagcaaagcttgagcaactgcttcaggattttcctctagtacaaaatgtgtgtaataaacctcctgtatatttgtaatggttgtcttcagaataaatactcttcttcactttaaaggcttatattttctgaaagattttttgacagtaattgcacttttaatgctttcattaactatgaaccttcttatgttgagtaagatgtgagtaggcattaatgggttttccatattctttatatttgtacaatttttctcaaggataatagctttcctgcaaaataagatgtacacattgattaaaggttttgccacattcttcatgcttgtaggaattttgccagtatgaattatcttactatcaaatgtggcaaccatataaaggctgtttcacattttatatatttctagggtttcacactagtataaattttttatgtatagaaaggatggaagtgttgaaaaaagcactgtcacatctttcaggtttgtagagttcctcttcagaatgaattatcaccatgtctcttaatagtaagaacttgtggccaggcatggtggctcatgcctgtaattgcaacactttaggaggctgaggtgggtggatcatgtgaggtcaggggttggataccagcctgacaaacatggtgtaaccttgtctctactaaaaatacaaaagttagctgggcatgggggtgggcacctgtaatcccccttacttgggaggttgaggcaggagaatggattgaacccagaaggcggaggttgcagtgagccgagactgtgctattgcacaccagactgggtgacaagagttgaaactccatctcaaaaaaaaaaaaaaaaagacagaacttgttatatgctttgccacattcttcacacttgtagggtttctttccagtatgaattatgtgtaataaaggttgagaagttccttaaaaaatctgtcacattctttatatttgtagagtttatatttcatatcaattcttagttagaaattgagggctggttaaaagattttccccattcatcacattcacatggtttctctccagtatgaattatcttatgtgcagtaaggtgtgaggataggtgaaaagctttaccacattattcacatctgtagggtttctctccagtatgaaatctcttatgtgtagtaagtttagaggagtgcttaaaggctttgccacattcttcacatctgtagggtttttttccagtatgaattttcttatgtgtagtaaggttagagaaatgcttaaaagctttgtcacattcttcacatttgtagaatttctctccagtatgaattatcttatgtgtagtaaggtgtgaggaccgcttgaaggctttgccacattcttcacatttgtagaatttctctccagtatgattctctcatgtgtagtaaggattgaggactggttgaaggctttgccacattcttcacatttgtagggtctctctccagtatgaattttcttatgtgtagtaaggttagaggagcacttaaaagctttgccacattcttcacatttgtagaatttctctccagtatgaattctcctatgtgtagtaaggattgaggactggttgaaggctttgccacattcttcacatttgtagggtctctctccagtatgaattttcttatgtgtagtaaggttagaggagtacttaaaagctttgccacattcttcacatttgtagggtttctctccagtatgaattatcttatgcgtagtaaggtctgaagaccgcttgaaggctttgccacattcttcacatttgtagggtttctctccagtatgaattctcttatgtgtagtaagggtagaggagtacttaaaggctttgccacattcttcacatttgtagggtttgtcttcagtatgaattcttttatgtgtagtaagggtataggagtacttaaaggctttgtcacattcttcacatttgtagggtttttctccagtatgaattatcttatgtgtagtaagggttgaggaccggttgaaggctttgccacattcttcacatttgtagggtttcttttccgtatgaattatctcatgtttactaagggttgaggatgacataaaggctttgccacatttatcacacttgtagggtttctctccagtatgatttctcttatgtgtagtaagagtggaggagtgcttaaaggctttgccacattcttcacatttgtagggtttctctccagtatgaattttcttatgtctagtaaggctacaagagtggttaaaggctttgccacattcttcacatttgtagggtttccctccagtatgaattttcttatgtgtagtaagagttgagaactgcttaaaagctttgccacattctatatatttgaaaggttttttcccagtatgtcctctcttttgtccgtttgaatttggaaattgatgaaggactttcacatatttatcacattgacatatttttcttggggtagttgtcaaacattggttaagttcattataaccttctttgtgcaccttacactcatccacacttatacatcctttttttaactgtaaattgtcatgttcacatttttcatatcttctcagtaccactttttggaaagaatctttcatgctctgctctggccaaaggtcttgggcaaaatgagaacacattactgaaagaaacaataaaaacacattacttcaattggtagactcagataaatataaatatatatatgcagtttgtatagttttatacaaactacataagcaagatgacacaggaaaataccacaagctgtaatttcttcctggacatatgaatttaacaaaaacatactgatcaaaatacatttgtaaaaaacttataataagttgtgaagggccccaggtgagcacaatgcaaacggccaaatagaagaaatagaaaagtctgttacttatacacaacacagctggttttgctctccagtataacattgtgcctttaaaagtaaattgttgactggctggggtgacacacgcctgtagtcccagcatgttgggaggctgacgtgggtggatcagaaggtcaggagttcaagaccatcttggcaaagatgatgaaattcaatctgtactaaaattacaaaaaattagctgggtgtggcgatggggcacctgtaatcccagctactcagaaggctgaggcagagaactgcttgaacctgggaggtggaggttacagtgagctgagattcccagaatctctagttaagacaattgatttcagactatgccaggacacagctacattataaagattgtaacaggtagcattttgttaatgtaaaaatctcaaagattacaataaatacaaaatagtagagcaacgtgatcccatcaaaaagttataaaatttttaaagcaaccataaaatgtatatgaggtaatttaaaaaattcccaataagttgtacaggtcaagcttagtggctcattcctggaatcccaacacactagggggccaaggtgggaaaaccacattaggtgagaatttgagaccagcctggccaacatggtgaaaccctgtatctactaaaaatacaaaaactagctgggcatggtggcatgtgcctgtaatcccagctacttgggaggctgacacacaacacaagaattgcttgaacctgggaggggacagttgcagtgagtgaatattgtaccactgcacttcagactggatgacagagcaagactgtctcaaaaataaaataggctgggcgcaatggctcatgcctgtaatcgcagcaacttaggaggccaccttggcctcctaatttgaggtcaggagtccaaaattagcctggccaacatggtaaaaacccatctctgctaaaaatacaaaaaattagctggaatgctggcagccacctgtaaccccagctacttgggagacagaggccggagaattgcttgaactcgggaggcagaggtagctatgagctgagatggcgccactgcactccagagcctgggtgacagaaaaagactccatctcagaaaaactaactaaataaataaatttgaataacattaggtaagtgaaacaaacaagtactgaagataaaaatgaggataataataagaaatattgaaatagcaaaaaaacaaaaattgtggatataaaaaatgcaaaaaacaattgaaaaatttcttaaaaggaaaaatgatgtaaacatgaaaaagctgaagaaacaaactaggatacacacaaagatatttgtaacaaacacacatacaagcaaaccttcaaaaatcatagataagaagagaattttaggagctgtaatgtaggcagatgtaatgatgaagaatttttgtattcaactgaagtttattttttaccacattcaaatatattgttggatcttttagaggttttatgtaatctcccaaagtaccactaagaaaatatttgtatggatacacaaaagaaaatttaaaaaatcctggaaaaataccaatacaaaaagcaaaaaaccacgaaaaccacagaaagaaaaggaaagacaaagatataagaatcaaataaaacaaataataaaataacattagtaagtttttctctttcagaaaaccatttaaatatatatataattatctttccaatcaagagatatactttcaataaacaggtttattaaaaaattttaaaaatcaagagtcaacttgcctttctacaggagtcagttgagatctactgacaaaaaaagactgaaagtggcaagacagaagtagaatttcatgtaaatatatttttaaattttattattattacactttaagttttagggtacatgtgcacaacgtgcaggtttgttacatatgtatacttgtgccatgttggtgtgttgcacccattaactcgtcatttagcattaggtgtatctcccaatgctatccctccccctgcccctgacgccacaacagtccccggtgtgtgatgtttcccttcctgtgtccatgtattctcattgttcaattcccacctattagtgagaacatgcggtgtttggttttttgtccttgcgatagtttgctgagaatgatggtttccagtttcatccatgtccctacaaaggacatgaactcatcattttttatggctgcatagtattccatggtgtgtatgtgccacattttcctaatccagtctatcgttgttggacatttaggttggttccaagtctttgctattgtgaatagtgctgcaataaacatacatgtccatgtgtctttatagcagcatgatttataatcctttgggtatatacccagtaatgggatggctggatcaaatggtatttctagttctagatccctgaggaatcaccacactgacttccacaatggttgaactagtttacagtcccaccaacagtgtaaaagtgttcctatttctccacatcctctccagcacctgttgtttcctgactttttaatgattgccattctaactggtgtgagatggtatctcattgtggttttgatttgcatttctctgatggccagtaattatcagcattttttcatctgtttttttggctgcataaatgtcttcttttgagaagtgtctgttcatatccttcgcccatcaaaaagatggggctgtttgtttttttcttgtaaacttgtctgagttcattgtagattctggatatttgccctttgtcagatgagcaggttgcaaaaattttctcccattctgtaggttgcctgttcactctgatggtggtttcttttgctgtgcagaacctctttagtttaattagatcccatttgtcaattttggctttcgttgccattgcttttggtgttttagacatgaagcccttgcccatgcctatgtcctgaatggtactgcctaggttttcttctagggtttttatggttttaggtctaacatttaagtctttaatccatcttgaattaatttttgtataaggtgtaaggaacggatccagtttcacctttctacatatggctagccagttttcccagcaccatttattaaatagggaatcctttccccattgcttgtttttgtcaggtttgtcaaaggtcagatagttgtaggtaagcggcattatttctgagggctctgttctgttccattggtctatatctctggtttggtaccagtaccatgctgttttggttactgtagccttgtagtatagtttgaagtcaggtagtgtgatgcctccagctttattcttttggcttaggattgacttggggatgcgggctctttttggtttcatatgaactttaaagtagttttttccaattctgtgaagaaagtcatcggtagcttgatggggatggcattgaatctataaattaccctgggctgtatggctattttcacgatattgattcttcctattcatgagcatggaatgttcttccatttgtttgtatcctcttttatttcactgagcagtggtttgtagtcctccttgaagaggtccttcacatcccttgtaaggtggattcctaggtattttattctctttgatgcaattgtgaatgggagtttactcatgatttggctctctgtctgttattggtatataagaatgcttgtgatttttgtacattgattttgtatcctgagactttgctgaagttgcttatcagcttaaggagattttgggctgagacaatggggttttctagatatacaatcatgtcatctgcaaacagggacaatttgacttcctcttttcctaattgaatacactttatttccttctcctgcctgattgccctggccagaacttccaacactatgttgaataggagtggtgagagagggcatccctgtcttgtgccagttttcaaaggacatgcttccagtttttgcccgttcagtatgatattggctgtgggtttgtcatagatagctcttattattttgagataagacccatcaatacctaatttattgagagtttttagtatgaagtgttgttgaattttgtgaaaggccttttctgtatctattgagataatcatgtggtttttgtctttggttctgtttatatgctggagtatgtttattgatttgcgtatgtcgaaccagccttgcatcccagggatgaagcccatttgatcatggtggataagcttttttatgtgctgctggattcggtttgccagtattttattgaggatttttgcatcgatgttcatcaaggatattggtcgaaaattctcttttttggttgggtctctgccaggctttggtatcaggatgatgctggcctcacaaaatgagttagggaggattccctctttttctattggttggaatagtttcagaaggaatggtaccagctcctctttgtacctctggtagaattcggctgtgaatccatctggtcctgaactttttttgattggtaagctattgattattgcctcaatttcagctcctattattggtctattcagagattcagcttcttcctggtttagtcttgggaggatgtatgtgtcgaggaatttatccatttcttctagattttctagtttatttgcatagaggtgtttatagtattctctgatggtagtttgtatttctgtgggatcggtggtgatatcccctttatcattttttattgtgtctatttgattcttctctcttttcttctttattagtcttgctagtggtctatcaattttgttgatcttttcgaaaaaccagcttctggattcattgatttttttgaagggttttttgtgtctctatttccttcagttctgctctgatcttagttatttcttgtcttctgctagcttttgaatgtttgctcttgcctctctagttaattgtggtgttagggtgtcaattttagatctttcctgctttctcttgtgggcatttagtgctataaatttccctctacacactgctttgaatgtgtcccagagattctggtatgttgtgtctttgttctcgttggtttcaaagaacatctttatttctgccttcatttcattatttacccagtagtcattcaggagcaggttgttcagtttccatgtagttgagtggttttgagtgagtttcttaatcctgagttctagtttgactgcactgtggtctgagagacagtttgttataatttctgttcttttacatttgctgaggagtgctttacttccaactatgtggtcaattttgaagtaggtgtggtgtggtgctgaaaataatgtatattctgttgatttggggtggagagttctataaatgtctattaggtcctcttggtgcagagctgagttcaattcctgggtatccttgttaactttctgtctcgttgatctgtctaactttctgtctaacgttgacagtgcagtgttaaagtctcccattattattgtgtgggagtctaagtctctttgtaggtcactaagaacttgctttatgaatctgggtgctcctgtattgggtgcatatatatttaggatagttagctcttcttgttgaattgatccctttaccattatgtaatggccttctttgtctcttttgatctttgttggtttaaagtctgttttatcagagactaggattgcaacccctgcctttttttttgttttccatttgcttggtagatcttcatccatccctttattttgagcctatgtgtgtccctgcacgtgagatgggtttcctgaatacagcacactgatgggtcttgactctttatccaatttgccagtctgtgtcttttaattggagcatttagcccatttacatttaaagttaatattgttatgtgtgaatttgatcctgtcattatgatgttagctggttattttgctcgttagttcatgcagtttcttcctagtctcaatggtctttacattttggcatgattttgcagcggctggtaccggttgctcctttccatgtttagtgcttccttcaggagctcctttagggcagacttggtggtgacaaaatctctcagcatttgcttgtctgtaaagtattttatttctccttcacttatgcagcttagtttggctggatatgaaattccgggttgaaaattcttttctttaaaaatgttgaatattgatcctcactctcttctggcttgtagagtttctgccaagagatcagctgttagtctgctgggcttccctttgtggataacccgagctttctctctggctgctcttaacattttttccttcatttcaactttggtgaatctgacaattatgtgtcttggaattcctcttctcgaggagtatctttgtggcgttctctgtatttcctgatttgaatgttggtctgccttgctagattggggaagttctcctggataatatcctgcagaatgctttccaacttggttccattctccccgtcacttttagatacaccaatcagatgtagatttggtcttttcacatagtcccatatttcttggaggctttgttcgtttctttttattcttttttctctaaacttctcttctcgcttcatttcattcatttcattttccatcgctgataccctttcttccagttgatcgcatcggctacagaggcttctgcattcgtcacatagctctcgtgccttggttttcagctccatcaggtcctttaagaacttctctgcattggttattctagttatctattcgtctaattttttttcaaagcctttaacttctttgccattagttcgaatttcctcctgtagcttggaatagtttgatcatctgaagccttctctcaactcgtcaaagtcattctctgtccagctttgttctgttcctggtgaggagctgcgttcctttggaggaagagaggcgctcggatttttagagtttccagtttttctgctctgtttttttcccatctttgtggttttatctacctttggtctttgatgatggtgatgtacagatgggtttttggtgtggatgtcctttctctttgttagttttccttctaacagacaggaccctcagctgcaggtctgttgaagtttgctggaggtccactccagacactgtttgcctgggtatcagcagcggtggctgcagaacagcggattttgctgaaccgcagatactgctgcctgatcgttcctctggaagttttgtctcagaggagtacccggccgtgtcaggtgtcagtccacccctactggggggtgcctcccagttaggctacttgggggtcagggacccacttgagaaggcagtctgcccattctcagatctcaagctgcatgctgggagaaccactactctcttcaaagctgtcagagagggacatttaagtctgcagaggttactgctgtctttttgtttgtctgtgccctgcccccagaggtggagcctaagaggcaggcaggcctccttgagctgtggtgggctccacccagtttgagcttcccggctgctttgtttacctaatcaaacaactaactcggcaatggtgggcgcccctcgcccagcctcgctgctgccttgcagtttgatctcgggctgctgtgctagcaatgagtgagactccattggcgtaggaccctctgagctgggtgagggatataatatcctggtgtgccgttttttaagcccgttggaaaagcgcagtattagggtgggagtgaccaaattttccagttgccatctgtcacccttttctttgactaggaaagggaattccctgaccccttgcacttcctgggtgaggcgatgcctcgccctgctttggctcgtgcacagtgcgctgcacccaccatcctgcgcctactgtctggcactccccagtgagatgaacccagtaccccagttggaaatgcacaaatcacccatcttctatatcgctcacgttgggagctgttgaccagagctgttcctattcggccatcttggctcctcccccctcatgtaaatattatcaaaacaagaggagaaggggtcaaaataatgttacacaagctacaagttaagttaaaaactgtcatactttataaagtgtatttaagtcaaaacttcaaaaagacaaagaaggacattagattcattcactgggaacctattacaaatttgtatatacatgtgtgtatttatgtgtgtgtgtctcatattggggtttcagctatataaagcaaatactaacaaaactgaataaacacaaagagagcaatacaattatagtaggatatttcaatactccactttctgtaataaaacaagagagaatattagtaaggaaacagaagactagaaggcagtaaaaaaacaattatttctaatgaaggtatagagaacactcctcgacaacatcaggatacacagccttctcattacctcatacaactttcttctttatagaccacctgttaggccaaaaacaaagccttaacacattttttaaaactgaaattttatagatcactttctatgacaaaaatggaattagagtataaaacaataatataaataattgataaatttaaaaatatttagaaatgatacaacacagtattaagcatgcacttgttgaaataactggctgggtgcggtggctcaggcctgtaatcccagcactttgggaggctgaggtgggtgaatttaactccatctcaaaaacaaacaatcgaaaaaggagtaatattgtgaagatgtctatactgttcaatttaatctacagaattaatgcaccatttttcaaatttctcattgcacttttgaataaaaacagcaaatccaaaagtatatggaatctaaagagttaataaagtactcaataatcttcaaggaataatgttggaggcattacaatttctgatttctaaacacatcaaaaagctacagaattaaaacaatttggtatgagtataaaagtgaaaaagtagaacaataaaacagaatgcagcacatatgttagctttcacataattattgcagcattgttactgaaagccaacaggttaaaacaatacaaatttctgtcatcaaatcattcagtaggtagaaaaatactggaatctcattcagttttcaaatagcagaaaatagtctaactattaagataaatattgatgacattatgcaaaataaaataagccagccagaaaaagacagagattatatgagatatgtaaagcagttatactcctagaaacagaaaacagagtggtgtttgaaaagtgccacgaaattggatgaattggtagttgtttaatgtgtagtgagatttagctttgcaagataaaaacattctagtgatgttgcataacaatgtctatataattaatatgaccaaactgaatatttagaaatatatacttgtcactctaactctcaggcaaaactgcagtggcattatctcagctcactgcaacctccgcctcctgggtttaagtgattcctctgcctcagccttctcagtagctggaattacaggtgatcaccaccacgcctggctaattttttgtattttagtagagacagggtttcaccatgttggccaggatggtctcaatcttctgacaccgtgatccacccacctcggcctttgaaagtgacgggattacaggcataagccaccgcgcccagcctagaaaattttattgttaattttgttatgtgtttttgacacataacgcataagtaaaaataaacaataatacctaaaagagatacagagtaattattgtttttaaattatcttcaaatccaaaaatgtttctctggcacaaaattaatatagattcaaaaataaatagacgctgaaattgggagagattttatgactactcacctagacaggattaaaaaaactgttacaggccaggcgaagtggctcatgcctgtaatcccagcactttgggaggccgaggcaggcagaccacctgaggtcaggagtttgagaccaacctgaccaaaatggtgaaaccctgtctctactaaaagtacaaaattagccgggtgtggtggcacattcctgtaatcccagctactcaggaggctgaggtaggagaatggcatgaacctagaagttggaggtttcagtgagctgagatcccaccattgtactgcagcctgcataacaagagtgaaattccctctcaaaaaaaccaaaaccaaaaccaaaaccaaaaacctgttacaccatacctacaaaacaaatatacaagtgacacaaagctacagggataatatttatacaggcaaagaaacacagaaacaattatattggcaatagatacatggctttttcatatttaattttgctcttcactgtcttaaattgtacagttaaatattgttacatacaattataaactaaaaaatatattgttatatacaattataatataaactaaaaaatcaacacataattaaatgatgtgatgtgacattcccaaaaatatataacacaaaatattaaattacaaaaaaattaaaacatgggatgtaaaacaagtagatcaatgtattcatgaaaggactcttaaaatataaggtaaagtaatacagaggttacttgaagatttaaaaaaaaaaagctgagaacttcccaaattttgatgtaacaacaacaaaaacttctaaccagtaatactcgattcaaaattattttacttcaaaaagaatataaaaataaagactttccaaaataaaagttgagactgttcatcaccattggcacagtcctacaagatataatatacagggttgtgctccctggctcacgcctgtaatcccaacactttgggaggccaaggtgggtggattgtctgaggtcaggagtccaagaccagcctgaataacatggtgaaacaccgtttgtactaaaagtgcaaaaattatttgggcatggtggcacattcctgttgtcccagctactgaggaggacaaggcaggagaatttcttgaatcaaggaggtggcgactgtaatgagccaaaatcatgccacggtactccagcctgtgacagagaaagactccatctcaaaaaaaaaaaaaaaaaaaaggcccagtgcaatggtgcccaccacactccatcctgggccatagagtgagactcaatctcaaaaaacaaaacaaaacaaaacaaaaaacaaaatcgaaatgattattcataaaacctttaaagttcttttatagaatataaaaaacaatatgtaaatgtgcataaatcggctgggcgcagtggctcatgcctgtaagcccagtgctttggaaggccaaggggggaatcacaaggccaggacttcgagaccagcctggccaacatggtgaaaccctgtctctactaaaaatacaaaaattagccgggcatagtggtgcacacctgtaatcccagctacacgggaggctgaggcaggagaatcacttgtacctgggagatggaggctgcagtgagccaagattgtgccattgcattcctgcctggacaacagagtgacactctgtctcaaaaaaaaaaaaaaaattctgcctaaatttgttaatataccatataaaataattttaatatcaataaaaaactggaaaatgtagagacatagtttttgtattaaattgaagttgttataaaattaaaacatattgttttaactttaagatgtatgtaatctccagctttcaagatgattacaaagataatatttatagaaagtgtgcaaaagaaaataaaaaataatgcatgccagtacaaaattaaataaaaattaagaaagtaaaacaggaaatgagaaaaataaaactactagaaacacacaaaacaataataacgtaactggaaataacaacttcatttctttaagcaatcattttaaatataaattaattaaactacttaataaaataaaatgtaatcttaggactttggaaggccaacgtaggctgatcacttgatcccaggagttcaagaccagcctgggcaacatggcaaaactctgtctctacaaaaaatacaaaaaagctatttgggtgtgatggcacatactagtaacccagctacttgagaggctaaaatgagaggataatctgagtttgggaggtctggatagcagtgagacatgcaaatcagcctggttgacagagtgaggccctatttcaaaaataaatgaggccaggcgtggtggctcatgcctgtaatcccagcactttgggaggccgaaatgggcagatcatctgaagtcaggagttcaagaccagcctggccaacacggtgaaaccctgtctctactaaaaatataaaaaaattagctgggcatggtggcgggcacctgtaatcccagctactctggaggctgaggcaggagaattgcttaaacccaggaggtggaggctgcagtgaactgagattgcaccactgcactgcagcctgggcaacaagagcaaaactgcatgtctaaataaataaataaataaataaataaataaaattatatagagaaaaagaaatagaaagcctgagtggtttttttaaaaagcaatcagtatgctgcctataagagactcattttagcattcagtcaaataggctgaagtaacagaatggaaaaacgtatattccatgaaaatagtaaccacaattgagtggggtagtcataattagacataacatgctttaagtcatgtactactatgagacaaagactgatattatattatgacaaagttagttgatgtagcagaaatctataactataatatttatctttctatatgtatatgtgtatataacatcagggctccaaaatacataaagcaaatattgacaaaagtgaaggaagacatacatagcaacataatcattgtagacatcaagaccccatttgcagtaaatggaaaattcagaaaaaaaataagaaacaggaaacttagaaaacattatagactatgttatttattttgcaaatagaggaataattgagagtacgttatttataacaaaaaggggtatatttggctcacagtttggcagactgtataagaagtgtgtgtcaacaactgcttctggtgaagatctcaggaaacttacaatcatggtgaaaaataaagagtaactggatgtattatatggtaagagacagagcaagtgtgaggtgaaggagccaggttcttttaaggaacctactctcatttgaatcaatagagcataaactttttggttaccaagaaaatgtaccagccattcatgagaaatttgcccctgtgacccaaacatgtcccaccaggtcctacatccaacattaaggatttatactgcagcatgaggtttggagaacatggatatccaaaccatattatagaccaactaggcttcacagatgcatacaaaactttccagtcaaaaccaagataatacaaaatattcttatttgcatctggtgtattctgttaggacacataccaagttttattaaattcaaaaatactgattgggtgaaatggctgttgcctacaatcctaacactttgggagatcaaggtaagaggatccattggtgccaaaagtttaagaccagcctgggcaacgtagtcagatccgaacactacaaacaaaccaaccattaaacagacatctagtgcgtatctgtagtcctagctactcagaaaactgaggtaaaaggatcacttgagcccaggaggctgaggctacagagagccaaaattatgccactgcacttcacacgaggtgacagtaaaatcttgcctcaaaacaacaaaaacaatcatttaaaaaagactaaaattacacactgtgtgttttctaataaaaactgaatgaaactaggaattaaaagcaaaagtcaaactggcaaattcaaaactgtgtatatgaaacacactcttcaacatattcttgctcaggggtcaaaaaatttcatttttcacaaaatgtcaataaaatctagagttaaaagctacagaacataaacaatgtgatactgacacaaagataaactgatgaaagaacagaatggagagctcagaaatgaacccttctgtatatgatgaaatgatcttccacaaagttgccatgagtaaaaaatggagaaaaataatctcttcaaaaaatgatgttgaaaagtgaatatcaacaccgataaaataaagttggattatttccttgaatgttacaaaaatatatttttaataaaatattatttaaaatattttaattttttaatattaaattcaattatttaaataattaaattattaattttaattattaaaattattaatttaattattaaaaatagtttaataaaataactaacaaatcttttaggaaaaaatacgggaaaaagacatgacactggtttggcacaattttcttagatacaaaattaaatgcctgagcaacaaatgaaacagaaaagtttacactagacttcaaaatttctgcatattagaaacaattcaagagtaacaacatcccttagaaaatgggtaaaacatttgcatattacatgtgacagaaattaatattcaaaatatataaacaacccttaaaactaaacaatgatgaataacttaatttagaaatggacaaatgaaatttttattagaaaagtacacaaatgagaaaaagcatttgaaaggacacagaaaattactagtttatagagaaatgaaaaaaaaaaacacaatgacaaacaaaatcacctcacacacattagaatggccactataaatttttttaaaaacaccaaatctgttgatgatgcaataaaaatgaaacctaagttgaatgttggtggataacaaaggtgcagtcattattttaaaaagttataaatgtttctcatttataaatctatatccaaaatacgtaaaaaaagccaggcacagtggctcaagcccgtaatcctagcaatttgggaggccaaggtaggggcagatcacctgaggccaggagtttgagaccaggctgtccctgtctctactaaaaatacaaaaaactagctgggcatggtcgtgggcgcctaaaatcccagttacttgggaggctgaagcaggagaatcgcttgaacccagaaggcagagattgcagttagacgagaccacaccactgcactctagcgtgggtgacagagtgagactccatctcaaaaaaaaaaaaaaaaagcaacacaggacctggaagacatatttgaaaatctatctttattataccagtattcaaaaaagccaaaaggctgaagcaacccagatgtctcttgatttaaaaatacgtcaaaaaatataacatatacataaaatggaatattattccaccttaaataaaacaatcttgtcacattttaagataaacattgagaatattatgtcacttgaataatccagtaacaaaattatggatactgtacgattccacttatatgagataccttaagtagtcaaaatcataaaaatagaaagtggaaattttgtctgtcaagggctggagagagggtaaaattagcagttgttatttcatgggtattgagttttagttttgcaagatgtaaaatttctaggagtcttttgcataacaatgtgaatatacttaacatgcctgaaatgaacagcttgtttattttgagacagggtctcactctgtcacccaagctggtgtgtagtggcacaattttgactccagctcaatctcccatgtagctgggaccacagctgcacaccacgatgcctgactcttattaatttttttttttatagaaaggggtctccatatgttccccaggctggtctcaaacttctgggctccaggaatcctcctgtcttggcctcccaaaatcctgggattacagaagagagccacaaccatgcctggccctgaaatatacacttcaataaatttaagatggtaaatgttatgttacgtgtttttaaaacaatgtttaaaaaaaaaaactgaaaaaaatccagaattattaatctttttgaaaattaccttcaaatcacaaaactgtttctctcacaaaaggaaatatatattcatcattaaacccatgttgaaaataagactatcttcatgactactcacttagacaagataaaactaccatcaaaaatcagctaagaatataagataagccataactaaaactggggtcatatttatagataaacacacacatacatatgtaatctgattgtgatagacacgtgcaatttatctcttaagcctcaaatggacttaaagtgtacaaacagaattgcaaattctctaaaattataatacataagtaaaaccaataggcacaataaactgatgttaagaaacctacactgagaccaggcgcagtggctcatgactataattgcagcactttggaaggccaaggtgggcagatcacaaggtcagaagtttgagattagcctgaacaatatggtgaaacaccatctcgaataataatgcaagaattggccgggggtggtggcgtgcctgtagtcccagctattccggaggctgaggcagaagaatggcttgaacttggaaggcggaggttgcagtgagctgagatcgcgccagtgcactttagcctgagcaacatggcgaaacttcctctcaaaacaacaacaacagcagcaacaacaaacaaaaaaactacactgaagaaacatgctaatacagaacttcaaacaataagacaaatgtttactcataaaatctggtgtaacacatggaagtatcattacgaaaatttgtcaggccaggcgcggtggctcatgcctgtagtctcgcactttgggaggctgaggcgggcggatcacctgaggtcaggtcaaccagtctgtcaacatgatgaaaccccatctctactaaaaatacaaaaattaccaggcatagtggcacatgcctgtaatcccagctacttgggaggatgaggcatgagaactgcttgaacccggaaggtgaaggttgcagtgagccaagatcgcaccactgcactccagtctggatgagagagggtaactccttctcaaaaaaaaaaaaaaaaaatttgttgaagtaactgcaatctttaactagtattatgtactcatcatatacaggtattttgaatcattggcatgcactgtgtagcagtaaaattttgagaatatgcagtataattataaatagattctaatgagaaacttaataaattagcatttaaaagaaactggagtttctttttatgttttaaatatatgctattcttacacaaaacgaaactgctgtattctaactttagaagcaaagaatagccttacattgttaaacacagaaaaaaatatatatatattttggagaatagggttagaccctctgatatgtaaaacaaatattaggaaataaactcattatttatatacagggtgaagaaagtagatgaaaattccataattttataactacttataactagtaactatgtttatatttagtaactattttcataaatatggagtgcttactaattatctaatttactttcagcataccatgcaaattctagcatattatcctaaataactgaatctaaaattacaaatttgaaatagaatatagaaagaaaaaaggtataaggagagtgacatcagtaagatgaaaataataaaagtgctctattttcatatccccttatagcaaaaaaagtcagccatccctgaccaaaaatgactttatgagacaaccaggcattatggttcacatctgtaatgacagctacatggtacattactgttggagagaaatgcttcaggccaggattttgagaccagccttggttatgtagcaagacgtcatctccaaaataagtgcctctaagagagatgtgagatccagggatgcagttgtgaaaccctattaaagctgaagttcgagacgtgttctattcagaaggcaggccctcattcaggtgggaaattacaggacccctgttcttggctacagaccaggatagggttcacccaacttggtcccactgagaattctgaacttactctgtagccaccacaaactcctcccaagccagagtctggcagaggtcctgctattccagagacctggaggaaggcatctatttacagccatgtaggcaggcctgcataccttggcctttaccatggtccctgaaacagttcactgactcagtttccgttacacgagccacagttcatggtcagtcctgcctatatagaaacccacacagttacctgaggaaatgctctctggtactcactgaaagccacactcatccacatcctgatttaaggcccagcatctgcagacctgactgcaaaaacatgccctagtgtctgccctacagagcaaagtcccgaaggatatgcagtctgtccaaaaataaaatggaaattacaactacccaagcccctgtaacaagccaactgaagatgaaacctaatggagacccagcagccttgtgaccaagctacaacccctcttcactacaaattcagagggcatctcatcaccctaagggcccaataaaagaaaatctttacaatctaaaatcagtttatgaaaacttgaagaggtgtctgctccatcaaattcaaacaccaatacaaaactatattgtgcccattttcaatgcttctattttaatgtagcactggaagtatgggcagaagaattagtcaaagaaataaataaatccattgaaattaaaaaataagtaatcttatatttaaaaaaccataaacagtacattaaaacctctctaaactaataaatacactcagtaaattagcaaaatataaaattaacatacaagtatatctatggtttcatacacttaaactatctgacaaaatagaggaagaaaattttattgactataccttaaataataaatttctgaggaaaatattaaccaaggaggtaaatctttacaataaaaaaaggaaaagttagaaaagatacaaataaattttaaaatattttgtctatgaattgaaaacatgaatattattgaagtgccatattatccaaagtaatctatagattcaataaacttcctattaaaattgcagtggtactattttcacaataatggaaaatacaattcaaaaatttacatgaaactaaaataaactttgaatagccaaagcaatcatgaggaaaataacaaagaggaaggatgtcataatttcaaactatatatttcaagcctagatagtaataaaaacagaatggactgtgcagaaaaatgaacaaaaaaaaattcaacagaaactattactctcagacatttcagatctgatgcaaagagaactttgagagtaattttagtttctcaaaatcatgcagacatttgtgcgtcccaaaaattatggaaaagcagccacactgtgcagtctcttatatgtcatgaagaggactttggctctcactgtgaacttgaaggaagctcactgaaagaaaaggaaaatccttagagaatttaaaagcataagacagaagatgcccctttgtaagcaaaattaaaaaagaaaaaaccaaacaaacaaacaaacaaaaaatagctgcccaagaactatttcctttggaacacagctccccaaatcacactttaaggactggctttctctttgaccttgggaccccttatctgtgtcatctgttgtattcattttcactcacacctacctgagggtttggctatcatctcatttctcttcatggtcaaaggttttcttccttgctccagacaggtgatcaggtctggcttagaaacagtaatacctgttttattaaaaataaataacataaatcttgcttatgttctccaattacaagctagtaatgtgctcagcacagaggatgtgataaaatattctagtaaattaatacaaaaatactaagttgtaacagaaatttttaaataattagaaaatactttcaatttgtaggtttcttaattttactacctggtgctactgaatcaaaaattggtggtggcaattagattttcaggtggagcaacaatattttatgccactaaatttctggaattaccactaatttagagtgaaaaatacagctcaactcaggaaagtggaaagtttggattaagataaaacatgttgaagaaattcttttctaaacgaacaaattctgaagattttctggaaaatggggatctgaaactcttttatgcaaagaataaattactaaaaaacattctacaaaaaataaataaataaaatctatagggtatattatgtactcaagttatcctcaccaaggaagaccaggttactgtagttctctaacatcacattcctatataaattccgctgtgcagtgtccaggcaatgccactcctccagagagaattctatggccacatctctaaattgcaatggtccctgaaaaacacacacacacacatttttaccaagtggccatgggcggaatttttaatttgacttaaggtgaaataagagagtaaagagaactggttctgacttataggactgactaaaattatccaataaaatgatttcaaaacagaaatattctctaatgtattctctaactctgagaagaaagagcagcataagatccacaacatcaattcatgtatgtttctagataataaagtataaaattaagggcaagaacaggaacatgtaaatttttcagtgctatagttacattatacagaatgagttgtgaatatttttcagatggaaaagacatgtttagttagaaggcatctctaaagttttaatatgtacaataagctgaagacatcgttatgcaggttttttttcccccagaagatctggaataaagtctgatttatttatttatttatttatttagagatggagtttcgctcttgttgcccaagctggagtgaaatggtgccatctcagctcaccgccacctccgcctcccgggttcaagcaattctcctgcctctgcctcctgagtagctgggattacagacatgcatcaccgcacccggtaatttttttcgtagttttagtagagatggtgtttatgttggtcaggctggtcttgaactccctacctcaggtgatctgcccactttggcctcctaaagtgttgggattacaggtggagaaaccacacctggccaatgtggtgaatttctaataagctcaacagtaatgccaatgtctttggcccaagaaggatattttgtcaaacatttagtaagtggaacagcctgtgtttttcccactttttctagcctgtaaacaaacagccctcatttaccaaagaaacatgtgtagaaaaaaaaataaggacagttgccagattaaatgtgatggtttatgcacatcagctgcataaagatacgtaataataaagaggaaaaataattaactctatagtgaaaaaaatatgtcccagagatctttaaccaattaattaatggttaatgcattaactgttaactgcactaggacaatggttttttttttttttttttttgagacggagtcttgctctgtcgcccaggctggagtgcagtggcgcagtctcggctcactgcaagctccacctcccaggttcacgccattctcctgcctcagcctcccgagtagctgggactacaggcacccgccaccatgcctggctaattttttgtatttttagtagagacagggtttcaccgtgttagccgggatggtctcgatctcctgacctcgtgatccacccacctcggcctcccaaagtgctgggattacaggtgtgagccactgcgcccggcctaggacaaatttttatgatgtgctaatgcacacagaagaacacagcatcactgttgtaatattcctcccaaaaaaagtaaattatagtccgaatgtaaccataaacatcagttttaggccaggcatggtggctcatgcctgtgatagcaatttgggaggctgcggcgggaggatcacaaggtcaggagttcgagaccagcatgactaacatggtataaccccatctctattaaaaatacaaaaattagccgggtgttgtggcaagcacctgtaatcctggctactcagcatgctaaggcagaattgcttgaacctgggaggtgaaggttgtggtgagccgagatcatgccactgtgctccagcctcagtgacaaagccagactccgtgtcaaaaaaaaaaaaaaaagaatcatcagttgtatacaaactttaaaatacagaaaactctatgttcagtaacttttagtagtaattttaagtaggcttcatttagcatcctaaagagcaggtatctcctaataatttttttcagaactttctgggtaataaatgccatcccatttaaataagcattttcttcttcttcttcttcttcttttttttttttctgagatggagtctggctctgttgcccaggctggagtgcagtggcgcaatctcggctcactgcaagctctgcctcccaggttcacgccattctcctgcatcagcctaccaagtagctgggactacaggcgcctgccaccaagcccagcaaattttttgtattttagtagagacagagtttcaccatgttgaccaggatggtcttgatctcctgcatgatccacctgcctcagcctcccaaagtgctgggattataggtgtgagccacggcacctggcctaaatcagcattttcttaatcctcttctgcatagagctaatggaacacacagctggagcctcaacattacatgttctccatctttactaaggaccacagttttccccaatagaaatcttgagtatccacatctttccatgttcaacagccacaaagggaacatttttaatattgcagatcataaattcttgctgagaattctgcatggcatataagaagctatgatgcggagaataaggagaaggctctgaaatataggaaagaaatatttttcagactcttgactatcgtaagaatttaaagaagtaattaagccaaactcattagggaggaaaaacacaagtagacaagtaaaggtttgtgagtactaaacgcatggcagtccaggaggcagagtcgacatagctcttcatctgacacatgtttacctgaagaaaagccacttttttttctttctcctccttctctggattccttctcagatgagattctctagacaagttacacctgttatcttgagactatgtctttaaaggtgtcagtaccacatgtttacctgctagcataacatcaactggcagaaaaataaagacagaaaaagtccacccatttctgtcctttacaacagaagacattcaggaacaatgagctgctccatgaagataaaaatataaatttctctttgctgtcctcagatgctctcccctgccacggacaccagccatttctgctacagtaatggaaataagcgccacactgacttgtccctaccaaacgcaaacagaacaggccctgtgaccaccctttagggcaaaggtggaacttaactctcatgaatgtattttgaacccctcatacttggttctggtctcaccttagagtcacataagggactccatggatgcttccacccagaacaataaacagaagctgtgcggaggacacaaggaatttctgcaaattggccatgtgattctaatgagaagcctgggttgataaccacggagctaagcattttctctcaagctttaatgagcttataaatcacttggtaattttggccccaatttatgtaatgtgactctggaggtttgaaaagggtccatgaatgggtgttttaaacaagttccctttcaatgctgatgttgctccccccgccccttggcgcattagcattagttagagaaagcaggtacagcacaaggtctcttattacttagcactcttgtcacaaccaaatacttctcgtacaaataaggacaacccatctccatccaaaagttttatatcctttgctggttctttaaagtttacagaaaaaacagaaggcagcaatgtctgaagaagtctggatttaaaaaacaacatgtacacacgtactaatgcaatgtttattaagcaggtactatgtgctcaagagtatgatacagagcactgtgctgggcgtaacatattacgtgatttaattctcataacaccctgggagccggtactaagtgtatgataattttcaggatttaggtaaagggcccaggatttttattgcttcttctgtttctctgccatcaaatttgttaaaaaaaaaaaccataaaaaattaaaactaaatatagacagatgaaagaaatatggaaggcaagagtttaatgtagttcagagaaaattttattctgtttatatttacatttttgtgacttgtggagcaattactggatatgcaagaatggaaaacaagtccctaaatagaatgtctctgcaaacactggttttaatataaaatttaaaaactaagaccctataacacataatttatttttcccatttatctgcttttggatttcaggaaattctaagcaccagctctagaaagacaacaggattcaccagccaaaactctgacctcttctacctgtgagacaagactccagggtagggtcagacgtaaataaggcctccaaaaagggtgaatctcaacagaactgggtcaggaagtggaccctatgtagaattctgttctctatgtcactggggtatttccagttttgttttttctaaacttacctaaaataaacttaaatcccagagtctgtgtaattttaatcttttccagccactgccctgtcaactttatattatatgctaatatgcaatttaaacaaatcccttaaggttttcaagggtaagtttattaggaaacaaatatgttcacttaacaggatgaaagaaatagaaatacggctgggcctggtggctcatgcctgtaatctcaacactttgggaagctgaggtaggtggatcacgaggtcaggagttcaagaccagactaaccaagattttgaaaccccgtctctactaaaattacaaaaattagctgggtgtggtggcaggcacctgtaatcccagctacttgggaggctgaggcaggagaatcacttgaacccaaatgtcagagtttgtggtgagtcgagattgtgccactgaactccagcctgggtgacagagggagactccatatcaaaaaaaaaaaaaaaaagaaattataacaacaattcttctgttcataaatatcctttcaagtacagacatcagaagtcacaacaatataaagtggcaaataatgtccaatattttggacatatctatttgttataccaaccatatgatgcataattcaagtatttatctagttgctagtctagactaagtttctggattgtaggaaccatggctgcttcatgttttattttaacggtcatatgaaatggaagctactagtttatctgtttgggtctccagatctcctccttgtttatcatcccagtaccaggaaactggagaaactctcatctgggtaccaacctaagacacctcttgtatgaggggatgaacaaacaggatgattcatttctcttacactgagaaagaagcagaattaaccactcttgtcagcctgacacaattctgctctggacatcctcaaatgtctcaaagaccactagatgattgtgagagaattcccagtgacctggggctggtggcccaatgataagccaggctagagactcaggctgattctaaataggaaatagaactgccttggtggagctacagaacctggatcacctgtcctgatttgctagctcttgtgtaagagaaagaacacaaatactctactccagtatcacattttacaggtaaatatagttgtggtcataactggatattttgtggccttgttctctcactcttaagatgctttttttttacacttacacatattctgtcatcagattctatttccttctggaggttctcacatcactgtagcaggtcaatgaacaagatgtgaaaaatctcacagaaccacactcccaaatgggagctgtaagctgtctaggttgacatctcacaatgcagaaaatgccttttcttagttttctgtacattctctatccaaagtccggtccttttttgtaaatcccaggcagaggccagatgttatctgcagattctaggtaggatccacctggctctgcatcctttggtgttacagcaagtggagtacaaacgaaggagagatcccccccatagaggctgctctagcacattctaaatgataagtctacatgaaaaaaaaaaaaaagctgacacaacatgaatataagtagacagtttatttgggtaaagtttacagattatatataacctgcgagcaaagattaaagttgcctggaatctacactttgagtagcagcatttacaagaagatttgtaaagacaataagagaaacacagagtgggcaaaattgtttgtcagaaatttctatttatttacaaaaataacattgattattgattagatacatatcattatagtttagggtatgggatatagtgtccaatgtagcattattagtttaatttatagctacatgtggcaatagtgaacagtctcaaaagatgaatacagaattcaaagggaggagaaagacataattgcacttttattttaacgtctctgagtttgataactaaaaggacttgcatttttcagataaaagttttttaattcccaaatctcaagacctggattcaaaatatggagctgcagatttagggcttgagtggctggagtagcacgcatgttacctgcacatttgtgagctttttagcaagagaaggaagaaagaaatggagattttcttgtctacatgtctactcactacacacgttactctacttgggtttgttggccccatggtctctgaatcagtttcaggtttgaagataaaagagtcactgaaagaggtaaaatgattgattgctgccctgtgaaatttatagaaatctgatctagactctctagaagtgactgtagaggactatagataagaaataggcagaaacacaattcggcctgcacatttagggtatggcatgcacttttctgcacaagtgtgaatttactggaagcctgagagggaatgtcccctcgagtaaattctggttggcccttatgtgtttatatcatgtctggtaattctagactgtttggaaacaataattaaaagaaaaattttctccagccccagagaaactccacaataacagaacagaaagaaaatggttttattacacaattaaacttgaatgtgacatgcatcagtcaatctgcttaagagactgcaaagatagaaagatggtcaccataattagttcacaagtagaagaatttccagcaccatgtcatacatagttcatcctaaattcacctggagattgaagaggacatctgtgtatgctaattacttatattcaatgacaaataaacttttcacctctttataacaggtggtagtttagcaggataatcgcttgaacctgggaagcagaggttgcagtgagcccagatagcaccactgcactccagcctgggggacagagtgagactctgtcccctgccctcccagcaaaaaaaaaaagaaaaagaaaaaaagaaaaagaaaggaaaagaacagggacatattttcagaagaattttataaagtttcatttccatctctgctgttctctcctctcctagccattgaatgggggtctatattgaaatacatcttacaacttccaacaacacattttgatgaaaaaatagaatctgactgtgttcatatactggaatatattagaacttgcaacatagctaattgaagagctactatagtttttgggtggccacatcacctgtctttatttgtcctgtaacagcagcatacaaatttagtgaaataaaagatactaaaattgtgtttcctcataattatcctgaatgaataaagtaataaacatgtctgactaatatctactaactgtaacaatttggttgtaaatattctttggatattagatataaatatctaagtatgaacaattttaatgaactagtcataatgtatgtagcattaaaaaaattaaaaccatacatcagttaggctgggcgcagtggctcaagcctgtaatcccagcactttgggaggccgaggcaggtgaatcacgaggtcaggagttcaaaaccagcctggccaatatagtgaaaccctgtctctacaaaaaccatataaaaaaattagccggacctggtggctcacaactgtactaccagctacttgggaggctgaggcaggagaattgcttgaacctcggaggcggaggttgcagtgagccaagatcgcaccactgcactccagcctgggcaacagaggccaggcgcggtggcttacactgtaatcccagcactttgggaggctgaggtgggcggatcatgaggtcaggagattgagaccatcctggctaacacggtgaaaccccgtatctactaaaaatacaaaaaaattagctgggcgtggtggcaggcgcctgtagtcccagctactcgggaggctgaggcaggagaatggcatgaacccgggaggcggagcttgcagtgagccaagatggtgacactccagcccggacgacagagtgagactccggaaaaaaaaaaatccatacttcagttaaaacattttatatttcaaaagcataaataacagtattaaaataaccatttaagtgattaattcaaagtaaatattgtggctttgtattcatactattttagaaaatactgtttatggctcacgcctgtaatcccagcactttgggaggctgtggtgggtggatcacctgaggtcagcagttcaagttcaagctggcaaacatggtaataccccatctctactataaatacaaaaattcagccaggcatggtgatgcatgcctgtaaacccagctactcagggtactgaggtaggagaatcacttcaacctgggaggcagcagttgtagggagcagagatcacacaactgcactccagcctcggcaacagagtgagactgtctcaaaaaaaaaaaaaatgaaaatatggtttaatttatatgaatgcagattatctacaaagataactgctaattgctctgaaataataaacagaaagcaaggtacaactacagactcaactgttcagtttataccctgaactgttcttgctttcgcagtataagtacttcagcctgcaaatattggatagttaccttggattatcaggtttctgtcaaagaaactgagtatcatttagtctttattattctgtattgctacctttactcctatctttgtgctaagcttctgtgtgctcttaaaatgagcttgtatctaaacaaatctgtgtctaccttaaaggaataaaaatcaaaaaaataaacttttcggaaccaaaaacaaagcaatacatcttaagtacttataataatctggagtcagaaaaaatgacaaaacttttatttagctgttgacatgatttacatatatttcaaacaagcagagaaaaatatctacatatattctaaatcccttaagaaaagagggaatagcggccaggcacggtggctcatgcctgcaatcccaacactttgggaagccaaggcaggtggatcacaaggtcaggagatcaagaccatcctggcaaacatcgtgaaaccccgtctctactaaaaatacaaaaaaaagaacaaaaaaattagctgggcatggtggcgggtgcctgtagtcccagctacttgggaggctgaggcaggagattggcgtgaacccaggaggcagaggttgcagtgagccgagatcgcgccactgcactccagcctgggtggcagagcgagactttgcctcaaaaaaaaaaaagaaaagagggaatagcaaaatttttttttggaactttttgaagagtttgaactcttggacatctgaaattagcacactgtatgcacttgaaataatgtttacaggggaaaaaccagaagagagaaagatatatgaaatccgtaagtgcacaagaccaacacaacagaatagagagcccagaaataatgtcaccctcctacactcatcagatttttgacaaagctgacaagaggaatatgggaagaattctctctttaataaatggtgcaggaataactacctagcactatgtagaagactgaaactggaccccttcattacaccatatacaaaaatcaactcaagataaattaaagacttaaatgaaaaacttaaaattataagaaactctgcaagataacatagagaataacattctagatatagacactggcaaagacttcatgatgaagctaccaaaagcaattgcaacaaaagcaaaaactgacaaattggacctatttaaactaaagagcttcttcacagcaaaggaaactataaatagctcaaacaaacaacctacagaataaaagaaaatatttgcaaacgttgtctatgacaaaggtctaacatacagaatttattaagaatttaaacaagtttacaagaaaaaggcaaacatctcattaaaaagtaggcaaataacacgaacagatgcttgtcaaaagaagacatacatgtggctaacaagcattattaaaaaaaaaaaaaaggtcatcgctagtcattagagaaattaaaagaaaaaccacaatgagataccacctcacacccatcagaatggctgtttttcataagtcaaaaaataacagatgctggcaaggttgcagagaaaagggaatgcttatactcttctggtgggagtgtaaattagttcaacaacagtaaaaagcagtgtggtgattcctcacagaactaaaaacagaattatcaatttgacccaggaatctcataattgggtatatagccaaagaaatataaattattatattataaagacatattcacatgcatgttcattgcagcactattcacaatagcaaagacgtagacaggccctgaatgcctatcactggtagacaagataaagaaaatatggtatggtcagatgcggtggctcatgtctgtaatcccagcattttgggaggccgaggcaggtggattgcctgagcttagaagtttgagaccagcctggtcaacatggcaaaatcctgtctccacagaaaatacaaaatgaaaaattggccaggcatggtaatgcatacgtgtgtagtcccagctacttgggaggatgaggtaggagagaactgcttgagcctgaaagatggaagctaaagtacgccaaaatcatgctatggcactctagcctgggcaataagcctatctccaaaaataaaataaaataaaagatttagtaaatacaaaatatggtacataaacatcatggaatactctgtggccattaaaaaaaaatgaccatgtcctttgcaataacactgatgaagctggagacaattattcttagaaaactaatgcggagtccaggcatggtggctcacgcctgtaatcccagtactttgggaggccgaggtgggataatcacctgagttcaggagtttaagaccagcctgaccaacatggagaaacccctctctactaaaaatacaaaattagctaggtgtggtggcatgcgactctaatcccagctacataggaggctgaggcaggagaattgcttgaatccaggaggcgaaggttgcggtgagccgaggtggcacaattgcactccagcctgggcaacaagaacaaaaatccatctcaaaaaaacaaaacaaaaaacaaacaaaaaaaagaaaattaatgcagaaacagaaaaccaaatgcatgttattatttataagtaagagctaagtaataagaacacatgaacacaaacagaacagacactgaggcctagttgaggggggagggtgggagcagtaagaggatcagaaaacatacctgttcggtggtatgcttagtacctcagtgacaaaataatctgcacttcaaacccccatgacgtaattttagttgtataacaaacccacatgtgtacacccaaccaaaaatcaaagctaaaaaaagaaaaaaaaaaaatccctgcgtgggagagagtgcaatgtaggtgaatggactgattttcattacagatagtggcccaggtggggctgttttctgatttatctttgtttgcatgcagacagatgagattataaccgggaggtccagaaccttaggttggtggaaaaaacaggttggtgcggcagattctgtatctaggggtggggatatgccaggagacctgtagagacttttgggttcttggcaagaaacgctaggatcaaaaatgccatggtgaagttcctgagggtggtgcccagtactgggaggagtgaggacatgtcaatgtctactgtgtgtgtttaggagtgggtgggaatcctgtggtggcagctacaagaaaacagggtctgtcatcagaactctttcctctaagttttcagtcttctgtcaccctggaagaagaccttaaatcacaggacaacaggcagtgtgacagcctgtgtacaggagagcagagcctcccattttcaaatacccagagctttgttccaggtctggccccagtgatatcttttttctggcaccaaatctatagagtttgctgaatatcaaacaattctccaacaccaactcattgcctaataattgaattctgacaccacctagagacagcacagaccctgatccagggctgggtcccacaacattgtcctcactgcagaggccaatcaaaaaccccataggcccatctatgcttctgagctactgtttgaaaactgaggactcccaaaacctccctgaagttcaataatttggtacagctacttacagaactcagcaaaacattgtagttatgtttaccggtttcatataaaagatgcagcccaggaaaagccaaatggaagaaatgcatagaacaaagagatggggaaagatgaaacacatagaaaatcctggaaaatatttgtgattaataaaattctccaccttttgtgtgctccaggaacagtatacggaaagaaacgcctttctcattatgacttagatggtgctctcttttcttacctatcacacagccagacacacactctgtacattttctcctttttctcattaagaaattcagctgaatttgtcttcagtggtcaaaataattttttttttttgagatggagtctcgctcggccacccaggctggagtgccttggcaccgtctcagctcactgcaacctctgtctccatggttcaagcaattctcctgcctcagcctcccaagtagctggcattacaggtggccaccacaactaccagctaatttttgtatttttagtagacacagggttatcaccatgttgaccaggctggtctcaagctcctgacttgcggtgatccgtccgcctaggcctcccaaactgctgggattacatgcctgagccatggcgctcagcctaaaatatttcttaatcaaactttacttaagtttatctccatccctcaggctagtgagggatggagataagccatctccaatgtaggagaaaagcccttttctgcctacatttttgcaacccatgaagattttttagttagctggtacttcttcctgttgcaatacttcttaggaattcattttttttttacataaatctaatattcttattttagaaagcgtaaaaagtgcctcaaaaccataacaacttcattaccagtaagaccctcccagtttcctttcatcttaatcttgactgcatctgcctgtggggccccagctttccaaggctttgtagcttctttcagaatgaaggctccttccgtggctggggtgagcagtcttgagatatccgcaagggagactccccagaaaaaaataacagggcctttaataacctcctgttggccgggtgcggtggctcacaccgataatgccagcactttgggaggccgaagcgggtctgaggcagagagttcaagaccagcctgacaaacatggagaaaacccgtctctactaaacaccaaaattagccgggcgtgatggtgcatgcctgtaatcccagctactggtggggctgaggtaggagaatcgcttgaacccagtaagccgagatcacgccattacattccagcctgggcaccacaagcgacactgtgtctaaaaaaaaaaaaaaaaaaaaaaaaataccctgttgcaggcttaatattagccttagcttggagtcactaggttcaagctttaatgtccacatcagttattcacttggtttttgaaactaagtgttagaaactccagtgaaattactcacaatgtttacataaaggaatttttaagatgcttactttttttttcttttttttgagccggagtctcgctttgtcacgcaggctggagcgcgatgattggatctcagctcactgcaacttccgcctcccgggttcaagcaattctcgtgcctcagcctcccaagtggctggtactacaggcacgtgccaacacgccgatagttttcgtatttttagtagagacgggtttcaccacgttggccaggctggtctagaactcctgaccacgtgatccacctgcctcggcctccgaagtgctgggattacaggcttgagccaccgcgcccagcaagaaaggggttttgaaccctaatgcagttcctgtttttgtttccatcccctattggctgggatcagaccgcacaatctaagctgatcctggtaagcttagacccaaactttttccaaataaagtaaatgcgcgatttgcgagaaaaggaaaagggggtagaagaagaggtagggttgatttacaacttttacaacttatgaccagaaagttgagtcatttaaaaggaacttagttgtcctaacacctctttacctcaagtgatccgcccgcctcggcctcccaaaacgttgggattacaggcgtgagccacagcgtccggccccatacatttttaataggagaaaagagaaactgtaaacccaaaggaacaaagctcttcccattcatgaacccgcaccccgagtcaggattctcccctgcccaccctcccctggtccctgcacaatctgggagagacgccacgctgcgggtgcagagctgcccagagagggctccaggccagggtagtcaccgcgcagtgaagagacaagacgcccgggtgccggctgtcagcgcagctgccattttatggctgaacaggactgaggccgagctgagcaaggagaactgggggagcagactgtggagctgactgcggggaggcctgagtcccgccacagccacttttcaccggttccaaccagtccctctcctctctcgggatgtcggaccctcactctcaccatttttggcttccaggaggtcccggtgtcttagctgtggatctcccaatacctgcaggacacggggccacacagcctgggcctttaggagaagaaccagacctggagctctgactgcagcgagagacaaaggccgcaccaaacccggaaaccgtcctcttcgctccagctgcgttcctgattggatggtttccagcccaccatccctgattggataatgcttaaggccccgccccctgaggccctgagtgacagtagatgtgatcagacgctgagctgagtgaagaaagagtgacagcctaagctgcagccttttcaggcagggcttccttcctgagctgagccaggcccaccccagagcatgggagaattctatcttttctttactctctctctttttgaatgtattcaaaaggtgaacagaagtattttgctctcatattaataatacataaaatttttgttcaagagaaaatcaacttttactttggcaataatgtattatcaatactaaaggtaattttgataaaaccttataaaaaatcaaatttgtcatttttgacctctcgagatttacatacatattttgtaatctaatgtaattttttaactttttatattttatttttatctacattctttttattttttcaatttgaaacaacctttaagtaatttcaaactgttacaagagacaaagaaatcatttagggccagtccgctggtgcacgcttgtaatccaagcactttgggaggccaaagtgggtggatcacttcaggtcaggagttcaagaccagcctggccaacatgttgaatctcatctctagtaaaaacacaaaaaattagccaggtgtggtggtacacacctgtagtcccaggtgctacggcggctgaagcaggggaatcgcttgaacccaggaggcggaggttgtgtaacggcctaagggcttcatcttgcctagacagagatgattcatcaagacaggggaatttgtggaggaaaagttaaatattaaatttgaactcagttgaacatggacacaaacaatggtcaccaagtcctggaacaggttatgtgagccccttgaggcattcacctgccgaccttcccctggtccctgcacaatctgggagagacgccatgctgcaggtgcagagctgcccaaagtgggctccaggccagggcacagtcacagcgcagtgaagaggcaggacttctgggggcctggctgtcagcgcagctgccatcttctggctgaatgggactgaggccaagctgggcaaagagaactgggcacagattgttttggagaaatctctattttaatctattcctatacgttagttattgaaaaacaatagccaatcgcaaaaaaaacaagttgacttttttgtgttccttgagcccagttgcaaagagcccagttgcaactgggcctcatgccaaacaacttgttacaaaaagagctaggatcccagactgcaccaaagctccaaagacctctccttgtctgtacagggatgggtggccgactctggagcccaggctgttgcttcctggtctgctgatgaatcctccatagtctggtgagtgtaaagatatatattttttctcttctccccttcccattgcaatgctcttattatatcaatttgcttattatatatgcattgccatttacctgggataaagcttgtttacccttaaaggtattgtgtgcgtgtcttttcttctcccctcatgtgtttcctgcacagaacatatttctcaaaggcttcatttgttcctttttattcatttttgtttaatcttgtctgcatgccttattttggcaaggtggtcttcaaactctgatgttctttcttctgcttggtcaatgcagctacaaatacttttgtatgcttcaggaggttctcatgctgtgtgttttagctccatcagatcatttatgttcctgtctaaaccagttattctagttagcagttcctctaaccttttatcaaggttcttagcttctttcaattggtttagaacatgttcctttagctcagcagagtttattacccatcttctgaagcctacttttgtcaattcatccatctcatcctctgtccagttctgcacccttgctgaagagacattttgataacttggaggaaaagccgcactctggcctttcagagttcttttgttgattctttctcatcttcatgaacttgtctagttttgatctttgaggctgttgacaactgaatggttgtttctgttttgttttgttttgttttgagacagagtctcactctgtcacccaggctggagggcagtggcacaatctcggctcaatgcaaccttcgcatcccaggttcaagtgattctcgtgtctcagattcccgagtagctgggattacaggcatgcaacacaacgcctggctaatttttgtattttttagtagagatggggttttgccatgttggccaggctagttttgaactcctgacctcaagtgatctgcctgtctcagcctcccaaagtactgagattactggtgtgagccaccatgcccggccttggatggggtttttgtcggtacttttttgttgttgatgttgttgttttctgtttgtttgtttttctttcagtggtcaggtccctcttctgtagggctgctgcagtttgctgggggttcacttcaggctctattcatctggttcactcctgttcctggagatgtcaatcaaggaggttggagaatagcaaagaagagtgtccgctccttcctctgggatctctgacctcaagaggcaccaacctgatgccagtaggatcgctcctgtatagggtgtctgacaacccctgttgaagggtctcacccagttgggtggcatggagaggagaacccatttaatgaagcactttgttccttggtggaggggagtgttttgctggggggaaacccactcatgtgggctgcccacatttttcagaactagcaggaggaaaggctaagtctgctggtccacagagactgcaactgtagcaggacgagccacagacaaaactcctcagacactgagttaaagaaggaagtggtttattcgaccgggagcatctggcaagactcctgtctcaagagccgagctccccgagtgagcaattcctgtcccttttaagggctcacaactctaagggggtccacgtgagagggttgtgatggattgagcaagcagggggtacgtgacaggtgctgcatgcaccggtggtcagagtgaaacagaacagaccgggaagtttcacaatgtcttttctatacaatatctggaatctatagataacataaccggttaggtcaggggttgatctttaactaccaggcttaggtcaggcaggctcaggcctggtttcaggtctggttccctggttttgtgtctggttttgtttcgcttttcttttcttttcttttctgagtacaaaacaatataaaacaatatgagagggtctgtctctcttctctcacagccaccccttcccctaggggctcaggtccagggacatcagaattctgtccctgagttcctgactggagctgttggagttcctgcagggaggcccagcccagtgtggagggatgagtcagggtcaggcctgaagagacactttggccgctgtctgccacagccagtgtgttgggctgtgggggacacctcttgagaccaagctgtccaacctccctggctctagcaggggaaaaatgcagccaggagctctagaaatggctgctgcccttcccgtgccgagggagcttagcctattaggcaactgggagtctcagtgctggctgctgtccctcctccaaggagctcaaaatgctgagactgcaggcagccacagccatggtgctggtcgcccctccctcgggacctcagcaggcttaagcagactctagctgagaggctgttaatccgttcaactccggggttggaatctgaggctccagtgccgtgggttcacgagcggaatcttctgatctgtggattgcacagtttcatggaaaaagcacggtttcctaggctgggtagcctgctcagtcaccgcctcccttggctgggagatggctgtggcaggactcaggcctgccgcactcagctccaaaatctgctcccggagtttttctcgcccagctcggcctctgttcccttcagccataacatgtttctcttccctgcgcagtgactgcgccctggcctggagccctctctgggcagctctgcacccgcagcgcggcgtctctcccagattgtgcagggaccagggcagggtaggcaggggagattcctgactgggctgcgggttcacgaatggaaagagctttggcccgtggggttcacagtttttcttttctcctattaaaaatgtatggggccaggtgctgtcgctcacgcctgtaatcccagcacttcgggaggccgaggcgggcggatcacttgtcaggagttgaagaccagcctagccaaaatggggaaaccccatcattattaaaaatacaaaaattagctggatgtgatggtgaatgcctgtagtcccagctactcgggggtcagaggagagagaatcgcttgaacccgggaggcagaggtggcagtgaggtgagatcgcgccactgcactccagtctgggcgacagagcaagactctgtcaaaaaaaaaaaaaaaaaaaaaggaagtcaccgcaaaaataacaagtaatttaaagagtgattcaagaattgtagagcacccagctacagtttgtagtttgtggtccatgggagaggcttgaagaaaagacatttataaggtgcatgatgaagaacactaaattcaataattggttagatatagttaggtagtttcttaatttgtacaatcaaggtggaaatttcctgattatgtaatcagagcttaattggcattttatagttgtttaagcttgaattgtgtttcccctaatgtagcgatttaccaaaaaatgcactcgagtttatatttttttcttagaagtagcaatccagggaatagagcctcttcagtctctcagactcctaaagtctaattgcctgccacttaattattttcacaccccacaggggactgattttctctggcatttttcacatgtgtcccaagtggggcctcaagtgtaccccatgttcctcaattaatcatttttaacactattaaataaatttgttttctgtttgtaaatatctcccctgagaagaaagaaaagaataatcccctgacactgtattgtaaaaatatttgtgcctctttttcttctatttttccagagaacttaccggaatgtttttaggtcaagattacccttcggaaactttatagggtgatgtgtcctcagctatccttcagttttttttctgggcctgggttttagtactttctggggataaaccaagatacccaccatggctatgtctgctggagtgtctagtgactattagctcttgggtcattttctcccataggaccacgtgaagtatggagtgtagcctctcaagggagcaggtggcagccctggggctgaaaggcatctcctggtgcacttttttttttttttttttttttttgaaaaactaactccttgagacatgaagattgtcttcaaccaacctagcttccatttcttggagacacattgctgggcagccaatcagatgctgatattgaggggaaaacagataatttctgccccctggattctcttgagtggggcagaaaaatagtgacaaaaaatagtgaaaaatttggaaaaaaaaaaaaaaaaactccaacagacaaaaaaaactgaccccagtgtgatggcataaaaacttatgaagtaaaatgtacctggggcactcactggggcatagcgcactatctcctgggagggtggttattgagcatgtaagtgaacaggatgggataggtaattggatgtgtaccttgaaaagatttgttcacttattttgacctcaggtatttatttatttatttatttatttatttatttatttatttatgagacagtctccctctgttgcacaggctgtaattcaatggctcgatctcagatcactgcaacctccacctcctgggttcaagtgattctcatgcctcggcctcccaagtagctaggtctataggtgtgcaacactgcgccttgctagtttttgtatttttagtagagatggaccaggctgatcccaaacttatggtcttaagtgatccacctgcctcggccacccaaagtgctgggattacaggcattagccactgtacccagctgcatcggttttttttactgtaatttgcattttattcatagggcttaaaaggtaagaaaatatttacaaaggacagaaaagagatgagtttcaaaaaattggtatttaataatatattccatttattaataattctcatttacctttttctttcccagagtaagcttaggaattttttcagatgtgttttttatggctgagttatttcaaacaaaattccaagccttagctttaagaatgctagctaccagctaagcgcggtgtctcatgcctgtaatcccagcactttgggaggatgaggcaagcatatcacgaggccggcagttcaagaccagcctgtccaagatggtgaaacaccatctctactaaaaatatgaaaattagccaggcatggtggtgggcgcctctaatcccagctaccctggagcttgaggcagataattgcttgaacctgggaggcaggggttgcagtgagccgagatcacgccactgcactccagcctgggtgacagagtgagactccatccccatctcaaaaaaaaaaaaaaaattagagcaaatctttctttcattttgactgtggacaatgaatatatttccacaggaaaatgtggtagataatttatggattacatagattcgtcaaaacaccagttcctctttttgcagggtaaatttgtgacagtgaatatcttagttctatatcatgttgccttgatttcttagtttaatgctaaattatatatgataaaacttatgtaccttctacaagtgtccccatatgactaattttttacaacactatttttaatagaaataataaaataatacatgtattttctgaaagaagtagacatatttgcttttcttatggagatacaaaatgcaggcaccttagccattttcagtggttcacacctgcaatcccagcactttgggaggccgaggcaggttgatcacttgaggtcagggtttcgagaccagcctgcccaacatggcgaaaccccgtctctactagaaatacaaaaattagccgggtgctgtggcacatgcctgtagtcccagctacttgggaggctaaggcaggagaatggctagaacctgggaggcagaggttgcagtgagctgagattgtgccattgcactccagcctgggtgacagagcgagactccatctcaaaaaaaaaaaaaaaaaagtaagcaccttaaaatttccttcccttatgtaaacacttagagtaatttcactggatttttcaagcagttagtttcaaaatcaagtgaataactctgacatggaaattaaagctttaacctagtggcttgaatctaaggctaatattaagcctgcaacagaaggttattagaggcagagttagatttttttttttttttttttttgagacagagtctcacactgtcgcctcggctggagtgcagtgccaggatctcggcttactgcaacctctgcctcctgggttcaagagattatcctgccccagccttttgagtagctgggattacatgtgcccgccaccatacctggctaattttttagtatttttagtagagacagggtttcactatgttggccaagctggtctcgaatgcctgaccacgtgatccacccgcctcagcctcccaaactgttgggattacaggcgtgagccactgcgtctggccaaaggcccagttacttttttctggaaagacttccctgcagatgtgtcagcctgctcaccccagccattgaaggagccgttgttctgagagaagctacagcgccctggaaagctggggtcgcacaggcagatgcagttgaggctaagatgaagggaaactgggagggtcttactgatcatgaagttgttattgttttgaggcactttccagattttgtaaaataaaaatgttagatttatgtaaaaaaaagaattccaaaaaattattgcaacaggagaaagcaataaccaactataagatctttatggcttgcaaaaatgtaggcataaaaggactttcttccctagggaggagcaaacaagtttagaaaggaggtgggagggaaatggcaaatggaggatgaaaaagtcagattttggatcagagaatgtcttaccctgaaatcagcatgttcttaggagggatgtaaaataaggttgtatgttgactcaggctgagggtagctcaaagttcaggagcctgagggagtgagataaccctaagtaaagtttgattaaaaaatattttattttaagctgggcacggtggttgacacctgtaatcccagcactttgggaggccgaggcaggcggatcacctgaggtcaggagtttgagaccagcctggccaacatggtgaaaccctgtgtctactaaaaatacaaaaatgagtcaggcatcctggtgggcacctgtaatcccagctactcgggagacttgaggcaggagaattgcttcaacctgggagaaggatgttgcagtgagccaagactgtgccactacactccagtctgagcgacagaacgagactccatctcaaaaaatatatatatatattgaccagtgaagacaaattcaattgatattcttaatgagaaaaaggagaaactgtgcagagtgtgtgtctggctgtgtgatatgtaagaaaaagtcataacaggaagagtgtttatttccataaactgttcttggagtacacaacagatggagaattttattaatcacaaatattttccaagattatctatgtgtttcatctttccccatctctttgttctacacatttcttccatttggcttttcctgggctgcctcttatatatgaaactggtaaacattattacagtgtttttctgagttctgtgagtagctttaccaaattattgaacttcagggaggttatgaaagtacccactttttaaacagtagctcagaagcataaatgggcccatggggtttgtgactggcatctgcagtaagaacaatgttgtgggactgaatcgctgtctgtgctgactttgggtagtgtcagaattcaaacgtttgacaatgagttggtgttggagaattgtttgatgttcagaaaactctacagatttggtgccagaaaaaagatatcatggaggcctggcctgtaataaaactctgggtatttgggaatgggaggctttgctctcctgtacacaggctgtcacactgcccattgtcttgtgattcctcccaaggtgacagaagactgaaaacttagaggaaagagctctgatgacagacccccttttcttgcagctaccaccacaggattcccacctactcccaaacacacacactagacgtgacatgtccacactcctcccaggactaggcaccatcctcagaaacttcaccatggcatttttgatcaaagtgtttcttgccaaaaagccacaagtgtctgcaagtctccttgcatatccccatccctgaacaatgaatctgcagcagcaacctgttttttccaccagcctagggttctggacctcctgttcataatctcatctgcctgcatgcacacagaaatgaatcagaatacagccccacctgggccactatctgtagcaaaaaattattcctttcacctacattacactctgtcccacccagggacattttttttcttttagcttttattttttgtttgaggtacacacgtgggtttgttaaacagctaaaattatgtcacaggggtttggtgtgcagattattttgtcactgaggtactaagcatagcaccaaacacgtatattttctgatcctctgagtcctcccaccctccgcccttaactaggctccagtgtcttgtttttctcctctttgtattcatgtgttcttattacttagctcttacttacaaatagtaacatgaatttggttttctgtttctgcagtagttttctttttttgttgttttttgttttgttttgtcttgagtaggagttttgctctttttgcccaggctggcgtgcaatggtatgatctcggttcaccgcaaccttcgttttctggattcaggctagtccattgcctcagcctcccaagtagctgggattacaggcgggcaacaccatgtgtggctaattttgtatttttagtagagatggggtttctccatgttgatcaggctggtctcaaactcccaacctcaggtgatccacccgccttggcctcccaaattgctgggattacaggtgtgagccacagtgcccggcctctgcattagttttctaagcataatggtctccagcttcatcaatgttattgcaaaggacatgatcattttttaaatggccacagagtattccatgatgcttatgtaccatattttgtttttactaaatcttttattttattttatttttggagacaggcttattgcccaggctagagtgctatggcatgatatttgcttacttcagtctcaacctcccaggctcaagcaattctgtagccctcatccttctaagtaactgggactacacgtgtgcgttaccacacctggccgatttttcattttgttttccgtggagacaggattttgccatgttgaccaggctggtctcaaacttctaaactcaggcaatccagctgcctcagcctcccaaagtgctgggattacaagcatgagccaccgcatctgaccataccatattttctttatcttgtctaccattgataggcatttagggcctgtccttgtctttgctattgtgaatagttctgcagtgaacatgcatgtggatgtgtcttgataatataataatttatatttctttggatatatacccaattatgaggttcctgggtcaattgataattctgtttttagttatgtgaggaatcaccacactgctttttatagttgttgaactaatttacactcccaccagcagagtataagcattcccttttctctgcaaatttgccagcatctgttactttttgacttttaaaaaatagccatcctgatgggtttgtagtgttctgaccagtgtgatgtggcatctcattgtggtttctcttttaatttctctaatgattagcgatgagcattttttttcatttgcttgttagccacatgtatgtcttcttttgaacagcatctgttcatattttttccctctttttaatgagattgtttggttttttcttgtaaacttgtttaagttcttaagaaattttgattattagacctttgtcaggcaaagtttgcaaatattttcttttattctctaggttgtctgtttactctgttgatagtttcttttgctgtgaagaagctctttagtttaaataggtcccatttgtcaatttttgcttttgtggcaattactttcggtagcttcatcatgaagtctttgccagtttctatatctagaatggtatttcccaggttatcttgcagggtttattataattttaagtttttcttttcagtctttatcttgagttgatttttttatatggtgtaatgaaggggtccagtttctgtcttctacatagtgctaggtagttattccagcatcatttattaaagagagaatttttcccacattcttcttgtcagtttcgtcaaaaatctgatgggtgtaggagggtgatattatttctgggctctctattctgttgcgttggtcttgggcactcatggattttttataacatctttctctcttctgctttttctcccataaacattctttcaagcgcatctagtgtgcaaaattcagatgttcaagagttcaaaaactctttaaaaagttccaaaaaatattttgctattccctcttttcttaagggaattagattatttgtagatgtttttctctgcttttttgaaatacaggtaaatcatattaacagctgaataaagcttttgtcagataatctgactccagattatctttctctagtacttcagatttattgctttgtttttgcttctcgaaaatttattttttttcatttttagtcctctaaagtagacacagatttgtttggataagagctaattttaagagcacacagaaacttaacacaaaaataggaataaatttagcaatacagaatgataaagactaaaagacactaagtatctttgacagaaacctgatgatccaaagcaattatgcagtatttgcaggctgaaggacttatactgcgaaagcaagaacagttcagtgtataaactaaacagtggagtctgtagttgtaccttgctttctattgattacttcagaacaattagcatagttatgtgtagtgtttgtagacaacctgcattcatatacattaaacagtactttctttcttttgagacagagtctcactgtgccacccaggctggggtgcagtggtgtgatctcatttcagtgcaaccactgcttcccaggttcaagcaattctcctgccttagcctcccaagtagctgggattacaggtgcaagccaccatgccaggctaagtttttgcatttttagtagagatggggtctcaccatgttagccagcttgatcttgaactcctgaccgcaggtgacccacccgcctcactcttccaaaatgttggaattacaggtgtgagacataaacagcattgtctacaatcgtatgaagataaagctgaaatacttactttgaatgaatcatttaaatggttattttagtatttttttatacttttgaaatataaagtgttttaactgaaatatatttgtaatttttaaaaatgctacatacattatgactagttcattaaaattattcatacttagatatcaaatatccaaagaaaattactatgaaattgttacagtaagtagatattcgtctgaaatgtttataactttattcaatagggataattataagtaaacacaatttaagtatcttttatttcactaaatttgtatgctactgttacagggcaaataaagacaggtgatatggcccctgagaaattgctagagtctgtggcacaggagggcacctgagaacaggaaaggagaaacttatatttttatcttcatggagcagctcatttttcctgaatctcttctgttttaaaggacagaaatgagtggacattttctgtctttgtttttcttccagttgatgttatgatagcaggtaaacatgtggtactgacatctttaaaggcatattctcaagatgcaggtgtaatttgtccagagaatctcaactgagaataaattccagagaaggaggagaaagaaaaaaagtggctttccttcaggtaaacatgtgtcagatgaagagctgtgtcaacttttcctcttggactgccatgcgtttaatactcacaaacctttacttctctacttgtgtttttcctccctaatgagtttggtttaactacttctttaaattcttatgatagtcaagggtttctgaaaaatatttctttcctatattccagagccttctctacattctcttcatcatagcttcttatatgccatgcagaattctcagcaagaatttatgatccacaatgtaggatacgtaaatttatcttcaaaggttttagcttgttaactttaaaatccaaaaggtgaagatcattaagtacaatgagttctgaggtcctcttcaaagaatcaatatgtcagtatgttctgctttcctgttgtttattctccattttaaagtttaacttcctcaatctttatgttccttgctcctagtttagtaaacaacccccttctaactcacatatttagagtttttagtcatccctcatcacctgctgtatcctgagtcaccccagtcacctgccttgtaactctcctttctgccaaaactactcaccatgccactctggcttgtacccttggtccctttaaaatagcctatcaaaattagcttaaactgtgtggtccaaccctacccaataggggaaacacacagaagtagggactagccgccttagggataagacccccttctcctcccttgtccaaaagtactctcaccattgttccatccacgagatgctgccttctatagaagtaaatttgccttgctgagacgttctctgtttgagtgcttgttttctgtttgactctgagcaattgtttccaacatgcaatatcaaaaatgttccctttgtggctgttgaacatggaaagaagtagatactcaagattcctattaggaaaaactgtggtccttagtaaagatggagaacatgtaatgttgaggctccatctgtgtgttccattagctctgtgcagaacaggattaagaaaatgcttatttaaatgagatggaatttattacccagaaagatctgaaaaaacttattaagagatacctgctctctagggtgctaaatgaagcctacttaaaattgctactaaaaattacagaacataggagtaatctgtactttgaagttgacataacacatgtttcttcatggttaaattcagattttatttacttttttgggaggaatatttcaacagtgatgctgtgttcttgtgcgtgtggtcttccttggtgagtataacttgaatacataattcataatataccctaaaggttttatttctctttttttctagaatattttttactaatttattctttgcatagaagagttttggatgcctttctccagaaaatgttcagaatttgttcatttagaaaacaatttcttcaagaatttttatcttaatccaaacttttgacattcctaagatgagttgtattcttaaccctgaattagtggtaattccagcagtttagtggcataaaatactgatacccccacctgaaaatctcattgccatcaccaatttttgattcagtagtaccaggtagtaaaatttaaaaacctacaaggagggtcaggtgcggtggctcattcctgtaatcccagcactttgggaggtttaggcatgtggattgcctaaggtcaggagttcgagactagcttgaccaacatggagaaactctgtctctactaaaaatacaaaattagccgggcatgatggtgcatgtccataattccagctactctggagggtgaggcagtagaatctcttgaacccaggaggcagaggttgcagtgagctgagatcacgccattaaactcctgcctgggcaacaagagtgaaattccatctcaaaaaaaaaacaaaaaacaaaaagaaacctacaagttgaaagtattttctatatatttagaagtttctgttataacttagtattttggtaataatttactagtgttgcaggaagtcagggaccccgaatggagggactggctgaagccatggcagaagaacataaattgtgaagatttcatggacattttttagttccccaaattaatacttttataatttcttatgcctgtctttactgcaatctctgaacataaattgtgaagatttcacggacacttatcacttccccagtcaatacccttgtgatttcctatgcctgtctttaatctcttaatcccatcatcttcataaactgaggaggatgtatgtcacctcaggaccctgtgttgattgcgttaactgcacaaattgtttgtggagcatgtgtgtttgaacaatatgaaatctgggcactttggaaaaaagaacaggataacagcaatgttcagggaacaagagagataaccttaaactctgaccgccagtgagccgggtggaacagagccatatttctcttctttcaaaagcaaatgggggaaatatcactgaattatttttctcagcaaggaacatccctgagaaagagaatgcatccctgagggtaggcctctaaaatggccatttcagggggcggccatcttttatggtcaagctgtagggatgaaataagctccagtctcccatagcgctcccaggcttattaggatgaggaaattcccaccaaataaatttttggtcagaccagttgtctgctctcaaaccctgtctcctgataagctgttatcaatgacaatgcatgcccaaaacttcattagcaattttaatttcaccctggtcctgtggtcctgtgatctcaccgtgcctccatttgccttgtgatatcttattaccttgtgaagcatgtgatctctgtgacccacaccctatttgtacactccctccccttttgaaaatcactaataaaaacttgctggttttatggctcaggggcctcccggaacctgctgacatgtgatgtctcccccagacaccaagctttaaaatttctctctttgtactctgtccctttatttctcagactggccaacacttagggaaaatagaaaagaacctacatgaaatattgggagtgaatttcacccaacatctggctgaatttcccctgataactggaatatatatgcatatatatatatatatatatatatattttttttttttttttttttttttttttttttttgagatggagtctcgctctgttgctcaggctggagtgccgtggtgcaatcttggctcactgcaagctctgcctcccgggttcacgccattctcctgcctcagcctcccaagtagctgggactacaggcacccgccaccatgcctggctaattttttgtatttttagtagagacggggtttcactgtgttagccaggatggtctcaatctcctgaccttgtgattcacccacttcggcctcccaaagtgctgggattacagtcgtgagcccctgcgcctagcctaatttactagaatattttatcacatcctctctgctgaacacattactagcttgtaattggagaatatgagcaagattcatgttatttatttttaataaaacatgtattggtgtctctgaaccagacctgatcacctgtctggagcaggaaaaaaaacctttgactatgaagagacatgagataattgccaaacccccaggtaggtgtgagtgaaaatgaatacaacagatgacacagattagagatcccaaggtcaaagagaaagccagtccttagaatgtgatttgggaagctgtgttccaaaggaaatagttcctgggcatctgttctattgtttgtttgtttgttttttaaattttattctcacaaaggggtatcttctgtcttgtgcttttaaattctctacaaattccacttttctttccgtgagcttccttcaagttcacagtgagagccaaagtccacttcagggcatataagagactgcacaatctggctgcttttctattgttttggggacacacaactatctgcatgattttgagaaactaaaagtttttaaagtttttttttgcatcagatttgaaatgtgtgggagtagttgtttctgttgaatatttttgttcatttttctgcccagcccattctgtttttattactatatagccttgaaatatagtttgaaattataagtatgatatttttctgctttgttcttttttctcaagattgctttggctattcaaagtttattttagtttcatgtaaattttagaattgtattttccgttactgtgaaaaaaataccactgcaattttgataggaaatttattgaatctatagatcactttggataatatggcactttaataatatttattctttcaatctgtagacacaaaatattttaaaatttatttagatcttctctaattttttcattgtttttttttattgtgaagatttttacctccttggttaattttttctcacaaatttattatttaatgctatagtaaataagatttgtttcatcttctattttatctggtagttgaagtttctgaaaccatatatatacttgcatgttaattttatattttgctaatttacgagtgtatttattagtttatgtagcttttaatgttctgtgatggtttttctaaaatataagattgtatgatctacaaacagcaactttttacttatttttctttcatttcaatggatttttttgtttctttgagtaattcttctgccacatacttccagttctacattaaaatagaagtattgacaatggacacaatatagttttgtattggtgtctgaatttgatggagcaaacacctcttcaagttttcatgaactgattttagaaggtaaggatctttctttgggcccttggggttatgagatgccctctgaatttgtagtgaagaggggttgtagcttggtcacaaggccgctgggtctgcactagggtccacctttagttggcttgttacaggggcttgggtagtcataattctcattttgttttggacacgctgcaaatttttcaggactttgctccatggggcagacactagggcatgtttttgcagttgggtctgcatatggtgggccttatatcaggacatggatgagtatggctttcactgagtaccagagagcatttcctcatgtaactgtttgggtttctatgtaggcaaaactggccatgaactgtggctcaggtactgaaactgagccattgaacgacttcagggaccacagcaaaggccaaggtctacaagtctgcctgcatggctgtaaatgggtatcttccttcaggtctctggaatggcaggacctctcccagactgtggctgggaggagtttgggatggttacagagttaagttcagaattctcagtgggatcaagttgggtgaaccctatcctggtctgtagccaaaaacaggggtcctgtagtttcccacctgaatgacatcctgccttcttaatagaacacttctcaatcttaagctttagtagtgtttcacaactccctcctgggatctcaaatctctcttcgagacacttattttggagatggcatcttgctgcttaacccaggctggtcttgaaatcctggcctgaagcagttctccaaccttaatgtaccatgtagctgtcattacaggtgtgagccataatgcctggtttctcataaaggcatttttgtcagggatggctgacttttttttttgctgtgaggggatatgaaaatagggcacttttaatctttttatcttactgatgtcactctccctacacatttttactttctattttctctttcagatttgcctgtaattttagattcagatatttaggacaatatgctagaatttgatggtattcctgaagtaaattagataattagtaagcactccatatttactcagttatttgtaaatttaagtttgccacaggcaaaaaggaattatagtattttcatctactttcttcagcttacatctacataataaaatagtttatttcctaatatttgtttcacatatcagagggtctcactttattctgcaaaatatatatgtgtatattttctatatttaacaatgtaaggctgttttttgcttctaaagttagattacagcagtttcattttgtgtaagaatagcatatatttaaaacataaaaaataacgttggtttattttaaatgcttatttattaaaagtttctcatcgtgttacccagactggtctcaggattttggccccaatggatcctcttatcttgatctcccaaagtgttaggattataggcaacagccactgcactcagtcagtatttttaaatttaataaaatttggtgtgtgtcctaacagcatacaccagatgcagataagaatattgtacattatcctggttttgactggaaagttttgtatgtgtctgtgaagcctagttggtctattacatggtttggatgttcatgttatccaaagctcatgctgcaatataaatcctcaatgttggatgaaggacgtggtgggacatgtttttgtatgggggcatatttctcatgaatggcttggtacatcctcttggtaaccaaaaagtttacactctattaattcaaatgagagctggttcattacatgaacctggctccttcacctcacacttgctcagtctcttatcatataatatgtccagttactgtttacattccaccatgacggtaagtttcctgagacccacaccaaaagcagatgctggcacacacttcttatacagtctgccaaactgtgagccaaataaactttttttctttgtaaattatgcactctcaagaatttctgtatatgcaaaataattagtacagtctataatgttgcccaggttttctgtttcttattttttatttgaattttctatttattattgcaaatggagtcttgatgtctacaattattatgttactatgtatgtcttgcttcacttttgtcaatatttgctttatttattttggagctctgatgttatatacacacattcatatagataaataaatattatagttaaagattcctggtaaatcagctcactttaccataatatattatcaatttttgtctcatggtagtacttgacttaaagcataatatgtctaatataattatgatcacttcactcacttgtggttactattttcatggaatatacatctttttcattcggttactttcagcctatttgactgaatgctaaaatgagtctcttgtaggcagcatactgtatgctttttagaaaaaccactcacactgggcatggtggttcacacctataatcccagcactttgggaggccaaggtgggtgggtcaactgaggtcagtagtttgagaccagcctgtccaacatggagaaaccccatgtctactacaaatacaaaaattagccaggtgtggtggcatgcacctgtgatcctagctactcaggaggcagaggtgggagaattgcttgaacccaggaggcagaggttgcagttagccaagatcgcaccattgcactccagcctgggcaacaagagcaaaattcagtctcaagaaaaaaaaaaaaaccactcaggcatcctatatcattttctttatattatttatttatttatttattttaagatggagtttctctcttgttgcccaggctggagtgcaatggtgcaatctcagctcactgcaatctccacctcccgggttcaagttattctcctgcctcagcctcccaagtagctgaaattacaggcacccacaaccacacccagctaatttttgtagtttttgttggggtgatcagatccaacaccaggttgtgggggctacgaagtctggcagagtcaaaggaatgggacaagacaagttaagagtacatagggtgggtccaggaggccaaagccagtttggaggctgtgaaggccctgagttctgggagtccacactatttattggtaatcaaacaatgaagcaggtgctgaggacgtgtggatatgagggtagacaggtgaggacgtgaggatagaaaggtagtggtgcatcaagtgtagctgtgacagtttagcatatgctgtgctacttaagataagggagaacaggttcttctaattcaagatccaatcatttatgatcttccgagagcaaggagcaaggggccagcgagtctggacacattccagaggttacaaggggttttatgccctgagccctgggttctctccaagccacaaggagttttatgctctgggcttagactgtagtgtggcagggcaggcttccaccatttggcacagagcttggttttccaaaggtcatgaggggttttagaccctggacccaggacatgttccaagactcttttacattatgtcagacaagcaagccctgcctcagctcttctgccaacagttttagtagagacggggttttaccatgatggctaggcttgtcttgaactcccgacttcaggtaatctgcccaccttggcctcccaaagtgctgggattacaggtgtgagccactgtgcccggcctcatttatttttgagatatgatctcagtctgtcaaccaggctgatttgcgtggttcactgctgcctgaacctcccaaactcagatgatcttctcattttagcctctcaagtagctgggttacaagtatgtgccatcacacacaggtagcttttttgtatttttagtagagactgagttttcccatgttgcccaggctggtcttgaactcctgggatcaagtgatcagcctaccttggtcttctaaagtcctaagattacattttattttattaagtagtttaattaatttatatttaaaatgattgcttaaagaaatgaagttgttattaccagttatatttatggttttatgtgtttccagtagttatatttttctcatttcctattttactttcttaatttttatttaattttgtactcacatgctttattttttattgtcttttgcatactttctataaatattttctttctaatcatctgaaaactggagattgcatgcatcttaaagttaaaacaatatgttttaatttcataaaaacttcaactgaatacaaaaactatgcctctatattttccagtttgttattgatatataaattattttatatggtgtatctattaacagatgcacgcagatttacacattgtttttatattctataaaagcactttaaaggttttatttaccatcatttttgttttttttggttgtttgttttgatttgtttttgagactgagtctcactctactgcccaggatggagtgcaatggtgcaatcttggctcactgcaacctctgcctcccaggttcaagggattctcctgcctcagcctcccaagtagctgaggttacaggtgcctgccatcaggccagcctggctaattttttgtatttgtagtatagatggggtttcaccatgttggccaggctggtcttgaactcctgacctcaggtgattagcccacctcagcctcttaaagtgctgaaattacagatgtgagccaccattcccagtgtggctgggatttaccatcattttgatagtaaagaattctatatgtgtccatatatttacatttattggagagctttatatttacatatgtttttatgatgctgtccagcaccattttatgtttctacataacggacacattttaacatttctctgtttttatatgtagggtctcattatgttgctcaggctggtcttgaacttctggtctcaagtgatgtgattgctttggcctcccaaagctgtagaattacaggcatgaagcactgtgcctgagccccgtgcagtattttttttttacttttttttttttgagaccgagtctccctctgtcacccaggcctggggtgcagtggcatgatcttggctcactgcaacctccgcctcccaggtgcaagcaaatctcctgcctcagattccatcccgagtagctggggttacaggtgcatgccaccatgctgggctaatttttattattattattatttttagtagacatggggtttcaacatgttggccaggcttatctcgaacttctgacctttgatgatccaactgccttggcctcccaaagtgctgggattacaggcttgagccatctcacctggcactttttttttttttttttgagatggagtcttgctctgtcgcccaggctggagtgcaatggcatgattttggctcactgcaacttccgcctcttgggttcaagtgattctcctgcctcagcctcctgagtagctgggactacaggtgtgcaccaccacgcccagctaatttttgcatgtttagtagggacgcagtttcaccgtattgttcaggctggtcttgaactcccgatctcaggcaattcacccacctcggcctctgaaactgctgggattacaggcgtgagccagtgtgcccagccccatgtagtatattttgtagaactgttagtggtgatgaacagtctcaccttttattttggaaagtctttatttttgtcttcttattgaagtagtgtaattttgaattgagttttactggttagaaatttttttttgttacattaaaatttgggaagttctcagcttttttttttttttaatcttcaagtaatgtctgtattactttttctctatattctaagattcctttcatgaatacattgatctgcttgatggtatccaataagttttacattccatgtgttaattttgttttgtgattttatattattgtgttatatatttttgggtatgccacatcacagcagttagttgtgttttgattttttagtttatattataattgtatatgacaatatttaactctgtacaatttaagacagtgtggagcaaaattaaatgtgaataagctgtatgtctattaccagtataattatttctatgtttgttggcctgtataaattttatcctggtatttttgtgtcacttgtatatttgttgtgtgtttcttgtagtaggttttttggagttttttgttgttgtttgtttgtttgagagagagttttgctcttgttgcccaggctggaatataatggtgggatcttagctcactgcaacctctgcctcctgggttctagcaattctcctgcctcagcttcccaagtagctgggattacaggcatgcaccaccatgccaggctaattttgtatttttagtagagatggggcttaaacattggtcaggctggtctcgaacacccgacctcaggtgatccacccacctcagcctccctaagtgctgggattacaggcatgagctactgcaccaagcctataacagttttttaatcctgtctagatgagtagtcataaaaaatctcctaatttcaacatctatttatttgtgaatctacattgttttgtgtgaaagaaacacttttggatttgaagataatttaaaaactataataactctgtatctctcttaggtattatttttacttatgtattttgtgtcaaaaacataacaaaatttacaataaaatatttctaggccgggtgcagtggctcactgagtgatattccagtatttttgtacctactgaatgatttggtgacagaaatttgcattgcttttacctattggctttcagtcacaatgctgcaatagttatgtgaaagttaatatatgtactgcattctgttttatttttctaatttttcacctttatactcataccaattgttttaattctgtagctttttgatgtgttttgaaatcagaaatggtaaagcctccaacgttgttcctttttttgaagattgttgggtactttcttgtctctttagattccatatacttttggatttgttgtttttatttcttcaaaaatgcaatgagacatttgaaaaacattgagttaaatctgtagattaaattgagcagtacagacatcttcacagtattaattctttcttttttggttgtttgtttttgagatggagttaaattcacccacctcggcctcccaaagtgctgggattacaggcatgagccaccgcacccagcccagtaatttcaacaagtgcatgctcaagagtgtgtcatatgatttctatatatttgtaaatttatcaaatatttatattattgttttatattctaatttcattttttgtcatagaaagtaatctataaaatctacattttagaaaatgtgttgaggctgggcgcggtggctcatacctgtactccctgcacttgggaggccaacgcaggcagatcacctgaggtaaggagttcaagaccagcctgaccaacatggagaaaccgtgcctctactaaaaatacaaaattagctgggcgtggtggtgcatgcctgtaatcccagctactcaggagcctcaggcaggagaatcacttgaacctgggaggcagaggttgcagtgagctgagactgcaccattgcactccatactgggtaacaagagtgaaacactccatctcaaatatatatatatatgtgttaagattttgtttttggactaacaggtggtctatataggagaatgttgtttgagctattgagaaggctgtgtattttgatgctgttgaggagtgttctctataccttcattagaaataagtgttttttactgccttctagtcctctgttccattattaatattatgtcttgttttattattattacagaaagtggggtattgaaatatcctactataattatattgctctctctgtgtttatccaattttgttagtgtttgctttatatatttgaaaccctagtttgagacacacacacacaaatacacacatggataaataaatttgtcataggttctcagtgaatgaatctatatattatttaatgtcctttgtctttctgaagtttgaacttaaagtacattctataaaatatgacagtttttgacttaacatgtatcttgtataatattattttgacctcttctactctcatttggttaatatttacgtgacatttctacttccattatttcactttcagtcttttttgtcattagatttcaactgagtcctgtagaaaggcaagttgaacattgattttaaacactttttaataaacctgtttattgaaagtatgtctcttgattggaaagataattatatatatatttaaatggttttctgaaagagaaaaacttactaatgttatattattaatcattttatttgattctatctttttctctcattttctctttctgtctttttttgtgtttttttatttctgtattgatatgctttcagtttttttcttactttcttttgtgtatctatataaatattttcttagataccttgggggattacataaaacctctgaaagatccaacaatatatttgaatatggtaaaaaactaacttcaattgcatacaaaaattcttcatcattacgtctgccttcaactttgttattgattttgctaattttatttttttatgttttatgttcattaacagatgtttataatcatgtctatacttttaccttttaaattttagagaataattaaaaatgttttctgtatcattatgataatgttaagtaataaatttcatttttgtgtatgtgcatattgcattatgttattttcagtgaaagaacctcctttcagcatctttgatatgtagagcatatgcaatgtcaatatactttctcaggatttggttattttggaaggacgtctttgtatttggtagtacaattttgctgatggtattattcccacttgacagctttttaaaaattattataactttaacaatatcacacagtttccttctgacttgcaaatttttttttgataaattcactggttatctcatgagactatgcttataaatgaaacatttttatattgtagtgcccaaaattcttttctcatatgccattttgaaattttgcttatatttgtgtctgttattatctttgtgtgtacctaaatttgttttttcagctttttcatgtttacgtcatattttcttttaagaaatttttcagttttttggtaattttatatccacaatttttggtattttaatttttttatctttatttttctgatcttcggtagttgtctgtgtttctatttttttctgatacggagtctttttctgtcgctgaggctggagtgcagtggcgtgatgtcggctaactgcaaactctgcctcccaggttcaagcgattctcctgcctcagcctcccgagtagctgggattacagctgcctgccatcacgcccaacgaattttttgtatttttagtagagacggggtttctccatgttggccaggctgatcttgaactcctgacctcaaatgatccacccactttggcctcctgaagtgctgggattacaggcacgagccacaaagcccagcctttttcattgtatttttgagacagtgttgctcaggctgcagtacagtggtacaatctccactcactgcaacattcccctcccaggttcaagcagttctcctgtgtcagcctcccaagtagctgtgattacaggcaaatgccaccatgcccagctaatctttgtatttttagtagatacagggtttcatcatgttggccagggtggtgtcaaactcctgacttcatgtgattttcccaccttgatctcccagtgtgttgggattccagaaatgagccactaaccctggcctgttcaatctattttgaatttttaaaattactttctatactttctatggttgctttagaaaattttatgtttttgatggggccatattgttctaatatttggtatacattataatctttgattgagatttggacattaacaaaaagctacctgttacaatctttataatatagctttgtgtttgcgtagtctgaagtcaattgtcttggctaaagattctgggaattcctcaaacatgtttttaggatgtatcttgtctaaaattttgtttttattgtttagataaatcagcttgttcacatttcttcttaataatctgtaatcacttgccacacccattccctgtttggggtactgcagtttctctgcttctctgtaatataccttcagactcagcagactcaaactgtcattccaacatgtatcaccatttctttcagcattttatgtcacgagaaacattaactaatgtctaagaaagcccctagaagccagaaataaagatatatgtgccaatatttttctagtttttttttgttttgtttttaaaaacgaggggttggcaatttacatgtgtgtgtatgtgtgagacagagtctcactctgttacctaggctggagtgcagtggcatgatcttggctcactacaatctctgccaccacagttcaagcaattctcctgcctcagcctcccaagtagctaggattacacatatctgttaccaagcctggctaattttttgtatttttagtagagatgggatttcaccatgttagtcaggctggtctcaacctcctgatctcagataatcctcccgccttgccctcccaaagttctgagattacaggcttgagccatcatgcctggtcagcaatttactttttttttggaggggcaggggatgaagtctctctcttttgcccaggctgaagtgcagtggcacgatctctgctcactgcaacctccgccttccaggttcaagcaattctcatgcctcagcttcccgagtagctgtgattgcaggcacccaccaccatgcctggctaattttttgtatttttagtagagatggggtttcaccatctcagccgggctggtcttgaactcctgacctcaagtcatccacccacatcagcctcccaaagtgctgggattacaggtataagccaccacatccatttggcaatttacttttgaagacacaatcttatatggagagcaggaagagctgtgttgggtataagtaacagacctctttttcttctatgtggctctttgcattgtgctcacttggggcccttcacacacttaactcatttatacattttttacaaacgttttttggtcagtatgtttttgttacatttatatgtccaggaagaaattacagcttatggtattttgctatgtcatcttgcttatgtagtttgtataattttataggttagatttgtaaagtatatttatctgagtctagcaactgaagtaatgtatttgtattgtttctttcagttatgtgttctcattttgcccaagacctttggccagagcagagcgtaaaagattctttccaaaaactgatactgagaagttagttatgaaaaatgtggacatgacaatttacagttaaaaaaagaatgtgaaagtgtggatgagtgtaaggtgcacaaagaaggttataatggacttaaccaatgcttcacaaataccaagaaaaaaatatttcaatgtgataaatataggaaagtttttcataaattttcaaattcaaactgacataagagaagacatacgggaaaaaagacctttcaaatgtatagaatgtggcaaagcttttaacaagttttcaacccttactacacataagaaaattcatactagagagaaaccctacaaatgtgaagaatgtggcaaagccttcaactggtcctcataccttactatacataagagaattcatactggagagaaactctacaaatgtgaagaatgtggcaaagccttcaactggtcctcataccttactgcatataagataactcatactagagagaaaccctacaaatgtgaagaatgtggcaaagcctttaagtactcctcgaacctcactacacataagataattcatactggagagcatctctacaagtgtgaagaatgtggcaaagcgtttaaccatgctgcatgcttctttgtcattttgaagatttgacttaaagtacattttataaaatatgacagtttttgacttaagatgtagcttgtgtaatattattctgagctcttctgctctcatttggttaatatttacatgaaatttctacttccatctttccactttcagtctttttttctcattagatctcaactaactcttgtagaaaggcaagttgaatcttgatttaaaaattttttaataaacctttatattgaaagtatgtctgttgattggaaagataattatatatatattaaaatggttttttgagagagaaaaacttactaatgttattttattaattgtgttatttgatttttgtatctttgtctctcattttctctttcttttttgtgtttttttatttttatttttatattgacatgctgtagggagaccccctgaaactatggctatggaatgaaagatgaaatgctcctgatagttgtaaatacaaaattacatgcaggattgtgtaaagacaatgccaggttgggctgccagaatgagccaacagtgcgtgatgtgcttcgccctgcagagagcctataaacggatgtgcagtcaggaaggtttcacatcaccaagattcctatcccagaaaagcagatattcatagctctgggaatggaatgcgacccttgtggagagcctacaaatggatgcatgaggggtgcctgttcatatggataacatcgggctataaacgcccttatcttgccatggctcttctaggtctctttagggttaagacatactcccttctgagaatttgtggtctaatcggttgtctagttttacatcctccttttattgattgtttgcaaccagcttttgctgtaattattactactgattaatatcttgctcatcattaatcatagattatggagagacggggtttccgttttaaggctctgttaaaaattgctgatgcacacactatattgtaaattcttatctctgtatactgtacttctgcatattgatgttatgttaaagaattacttcattcccatgtgaccatctcacctcataatcaaacgactctaaatccctcattaacctacccccaccctcactaaacttaataataaatgctggtatatccagtgcattggcagcatggcaggaccagaaggcggtgaccctcctggactcaactttcactatcttgtgtgtgtcttttatttcttgacctgccgatccacctgggaacaaagaaagagccccattgcattgcgggctgctggccagatcccgcaataacatgctttctgtttttgtcttatttcttttttatgtatctatacagatattttctaagtggtactttcaaggattacataaaacctctaaaagatccaacaatatatttgtttgtgataaagaatcagcttcagttgcatacaaaaattcttcatcattacatcagccttcaactttgttatgattttgctaattatattttttatgttgtatattcattaacagatgtttatagtaattcctatacttttatcttttaaattttagaaaataactaacaatgttttctgcaccattatgataatgttaagtaagaacttttatttttgtgtatgtacatattttttccagaaatttatgtattttcatatgattaagtgttgttttcttgcattatattattttcagtggaagaaactcctttcagcatctttgatatgtaggacatatgcagtgccaatatactttctcaggatttggttactttggaaggacttctttttatttgagagtacaattttcctgatattctcattcccacttgacagtttttttttaattataactttaacaatatcacatagcttccttctgacctgcaaattttttaataaattcactgattatctcatgaaaccatgcttataaataacacatcatttttatcttgcacctcccaaaattctcttcttcttatctgtgatttttgaaattttatttatatgtgtatttgttatgaatatctttggtgtatcctagtttgtttagcttcttcatctttatatcatgttttaagaaattttcagttatttttttgtattatttatattcacgattttttttgctttttttttttttttttgatgcagagttttgctcctgttgcccaggctggaatgcaatggcatgatctcggctcactgcaacctccgcctcctgggttcaagcaattcccctgcctcagcttcccgagtagctgggattacaggtgcccaccaccacatccagctggtttttgtatttttagtagagacagggtttcaccacattggccaggctgatcttgaactccagacctcaggtaatccacctgccttgggctcccaaagtgctgggattacaggcgtgagccaccgtgcctggccttttttttcctttttaatatttcttgttgttatcctcatttttctaatcttcagaagttgtctgtgttcctatttcacttactgaatattattcaatatatttgatttgatttgatttgatttgatttgatttatttattattctttttgttttctgagacggagtctctttctgttgcccaggctggagtgcagtggcacaattttggctcactgcaacctccgcctcctgggttcaagcaactctctccctcagtctctcgagtagctgggactacaagcacccaataccatgaccggctaattttttgtatttttagcagagatggggtttcactatcttggctggtcttgaactcctgacctcatgatccaccgatgtcagcctatcaaagagctgggattactggcatgagccaccaagtccagccagctttttacttttaaaagcacaatgttatactggagagcaggaggacctgtgttgggtataagtaacagactttactttttcttctatgtggctgtttgcattgtgctcacctggggccgttcatacacgtaacttatttataaatttgttacaaatgtattttggtcagtatgtttttgttaaatttatatgtccaggaagaaattacagcttgtggtattttcctatgtcatcttgcttatgtagtttgtataattttataggttagatttgtaaagtatatttatctgagtctagcaattgaagtaatgtgtttttattgtttcttttggttatgtggtctcattttgcccaagacctttggccagagcagagaataaaagaatctttccaaaaagtgatactgagaagatatgaaaaaaatggacatgacaatttacagtaaaaaaaaaggctgtgaaaatatggatgagtgtgaggtgcacaaaagaggttgtaacggacttaaccaatgtttcacaaatacccagagcaaaatatttcaatgtgataaatatatgaaagtctttcataaattttcaaattcaaacagacataaaagaagacatactggaaaaaacctttcaaatgtatagaatgtggcaaagcttttaaccagtcctcaacccttactacatataagaaaatttatactagagagaaacctacaaatgtgaagaatgtggcaaagcgttcaactggtcctcacaccttactacacataagataattcatactggagagaaactctgcaaatgtgaagaatgtgccaaaacctttaagcagtcctctaaccttactacacataagataattcatactaaggggaaaccctacaaatgtgaagaatgttgcaaagcctacaattggtcctcaccccttactacacctaagataatttatactaaggagcaaccctacaaatatgaagaatgtgacaaagtctttaagaactcctctcaacttaccacacataagataattcataaaggagagaaaccctacaaatgtgaagaatgtggcaaagcctttatgtactcctctacccttactacagataagatacttcatactggagagaaaccctacagatgtagagaatgtggcaaagcttttaaccatcccacaacacttttttcacataggaaaattcacactggagagaaatcacacaagtgtgataaatgtggcaaagcctttatttaatcaccaacccttagtaaacatgagataattcatacaggagagaaaccctacaaatgtgaagaatgtggcaaagccttcagctggtcctcacaccttactacacataagagaatttctactgcagagaaaccgtacaaatgtgaagaatgtggcaaagctttcagctggtcctcacaccttactacacataagagaatttctactgcagagaaaccgtacaaatgtgaagaatgtggcaaagcttttaactgatcctcagacattaataaacatatgataattcatattggacagaaaccaagaatgtgacaaagctttttaaggaagttctcaaccctcattacacataatttatactggacagaaacctacaagtgtgaaaaatgtggcaaagcctataacaagttctcatttttatttttttttgagacagagtttcagtcttgtcacccaggctggagtgcaatggcacaatctcggctcactgcaacctccgcctcctgggttcaagccattctcctgcctcagcctcccaagtaagtgggattacaggtgcccaccaccacacccagctaatttttgtatttttagtagagatggagtttcaccatatttcccaagctggtctcaaactcctgacctcaggtgatccacccgcctaagcctcctaaagtgctgggactgcaggcatgagccaccatgcccagccacaagttctcaattcttaagagacatggtgataattcatgctgaagaggagctctacaaacctgaaagatgtgaaagtgcttttagcaacccctccaacttttctatacataaaaaaaattatactggtatgaaactctagaaatacataaaatgtgaaaaagcctttatatggttgccacgcttgattgtacataagataattcatactgccaaaactcctacaagtgtgaagaatgtggcaaaacttttcatcagtgcttacaccttatttcatagtaaagctagtatctttgagaaaaatcgtacaaatataaagaatatggaaaaaccattaatgcctactcacatcttactcaacataagaagattcataattaataaaagcattaaaagtacaattactgtcaaaaaatctttcagaaaatataaacctttaaagtgaaaaaaaatttattctgaagacaaccattacaaatataaaggaggttgtggtacctttacttgtatcacagatcttattgcaatcattttgtactagaggataatccctaagcagttgctcaagctttgttcaacatcagggattttatattggagaaaagtcctgcaaatgtaatgaatttggagagacatttttttttttacaaaaactacagcttgtaaaacaccagagagtttatactaaagtatatttttgccgttgcagtaaataagaaaaaatgcttaattcaaaattgattctatgtaaatatcagagaatttacactagaataactaaggcactgacacttcagacattacacttagagtgttgagtataaaaactaatccacgactaaagttgttagataaattatttgtatgtaactataaaaggagtagattttttgaagcattgtaattacattgaaagtatacttgtttccttgaaaaaaattttttgaaaagtgaataatgatgtaatacagctttcaaattactttgtgctgttattttattcctatcgtattcacgtgtgaaagcatgtgatcaattgttgctgcatcgagatattagagattcttttttattaattgggcatatttatgaccttttctataaaagagtaaggacattaaaatgaaagatgcctgatgaaaatataagtggagaggttctttgtagttaacctatattaagtaatgcatatggtagatgttcagagtaatacttttctatattatagtgagagaaattattaattatagttaaaagtatattaaaataaattagtaattttactggttgtacttttatgtaataaaatgcagtacatttaaaaattgttagattatgtgtgaacttattttttttaccatgttaagactactgtgcattgaatgaagcattattatgcaactaaatttagcctatcccacattacttaagggtgtaggtaaaagatggtagcaatatactatttggtgcatagtggaataacatctctagtaatcactttgccagtggctttaaactgcaaatgagttgaagaatactgttcttataggttaaatttttactcttttttcttactgaaatttattattagtatttgtgtgtatacagtatgtgtatatatttatgccttatatggcatatttgtattcaagcatacaatacgtagtaattacactagggtaaatagagcatccatcatctctagcatttattctttctattacaaacagtgtaattatacactttattatttattgtaaaatgtacaattaaattcttatggactacagggttatttttatggttataataaaaattatacagaaatataaatagaatacagccaggagcaggggttcatgcctgtaatcccagaacattaagaggccaagacaggtggattgcctaaggtcaggatttcaagaccaggctggccatcatggtgaaaacccatctctattaaaaatataaaaatataaaaattagcagcgcatgcctggaggttgaggcaggagaatcgcttgaacccaggagatggaggttgcaatgagctgagattgcaccactgcactccagcctcagtgacagaagagactccatctcaaaaaataaataaataaaataaacagaaatagaaataaaattcatacatttctgagtcctgaaaaattattaataaatatttgttatatagttttctttgaacatgtggtctctctgcatgcaatcatatagacttttaatttacatagagttaagtatacacatattactctgaagataaaccttagatgtaagaaaattataaagtgagtgtgtttgtgtatgagtttgtacatatttttagaagaaaagtgcaattattggaacaaaacaaattaattaggtgactaatagaaaactaaacaccatgaaaatgctgaaagcaaatctatactttctgctttgtcttgaatttattaatgtaaaattttatgacttatggttcggattctccccagaatctgcctattaaagcacaggcaactttctctccagagataacactcttgagtacaacaataaaagccctcttcaaacagaaaacaattatttctaacatttattttaatgtaaatttcactaaaattgactaagtggatagatttttattgttctatgtgtgtgtgaatgtataaaatagtacataaaggaaaaataagccagaaagaagatgttagttaatatttgtgatgaataaaactggaaaggagttaattattatttgcagatgacagctttgtttatgtagataacaaaaacagcagaaagaatattttaaaagcttattcagttgggtaggcaacattctaagataataccctggattcccagtctgttgcacacctgctgtgtaatactttcctcttgagtgtaaaaagatgtgtgactgtggtgggaaattactcatgaaattaggttactcatgtgttgactttgtgttatcaaaatggagattatcctgattgtgctaatcttaatcataggtgcttttaagggaaagagacacatcacagaaaatcacccctgctggctttaaagtcagtgacttctaggtgggccatgttgtaagctgcttatggtggtcacatggcaggaaacatgtttgtatattgtcatcattcctgcctcctggatgttgcttccagtagggagaataagaggatcctatggcagagggggaagaaaagggaaattcattcatgcaagaaataatcacctctcatctgggatagcttaagagaaagaggagaccacaacaggaccaaattaatgggaggaaaaaggtaacctgggtaaaagtgctctctggcattatggaactacatttagtaagctgtagtgaatgatcagcctctgggataccaatagtctaccaacaaggctgaactcattctaattcaatcagcatgtctgcaccattctggtgacccaggtttacagtattcattacagaaataccatgaagaccagtgggtaatgtcctagaattgaacttatttcaaaaagcattcctaattatttgttttcacttttgaaaaaccttaaaaacaatacatttataaataattaacttctaattatagaggattctactatactgtaatataatattaaactgtaaacaccttaacatgaatattgaatgcatgattagttatgtagatggtttgttttagattaacatgacaaaagtaacaattagagaaaacatttgacatgggataaaattaatcaaaaccacatcttttcaatggcttggcataatttccatgcttttggaaatggccagataattagcaagaaacaaagacaagattttggctttgctcaatgatggtttttgaccttttgaaatctaaaatccttgctaaagtattcaaagggagtattttattggtggctgcccagggtttccaaggcaatgaaggaagaattttgataggcaggaaaatgcacactatatacacacattgctcttctctgatttgctttaacactgaaaaattgaagttgtaaatgtagtctcaatttagagtaaattaacaaatgacttgtttttcaaaaaagccaatgtataaaattaatgggtaacagaagccattagctgctaaaaactagtatgactaaattcagtaagtatctagccatgcaaataacagtccaattaaatgaagaccctcataggtgcatatggaaagcattgctgtgcagtgtggtgcctccactcagcattttcttctgcctcttcacagagaaaccagtttcccctgagtgactcagggtgcatactgggaactgagaatgctgtgttcagagtgattactgaaaacatggttaacacacttcttccatatgataataaaatgttataaatcttactctgcctcagaaaagcttttagtaaatgattatagtactcaatttgggtttatggagaatttcaatgttccagataattcagacacttaaatgtcaatgaaatcccataaaacatatttgaataagataaagtcttcttagctaacaaatttgtattactagtacatttataaaaaaatagaaaaccagtactttaagccaaataacagtatttgacacgttagtagcacccaaacaagtgctcttcacgatcattgttaaagcagcaatagcaccacgtgctttcctgggacctgctggcctgttttccactgatataaagtggagaaggcattgaaatagcaaaggagggtgatataaattgaatacttatatgaaatacaattttaaataaaacatagcacttgatgttgtacaactataggcgagactattagtgtgaggtcatatttttacttatattgacaaaataatcattcacaatattcttatttagaataatattcctgttctgctgtatatttgctagcttttgatcaaatatttgggagctcaatagaaatcaacaaaatgaatctttattttaccacaagcattattgatgcatatgcttgtttttattaaaatccattaatgttttatgaaagattatacttttgctgggtgcggtggctcacacttgtaatcccagcactttgtgatgtaaaatcacacccttgtcttttttgtctttgtggctgaagtcgggtatttatggtaatgcaaaagaagtctaggtctctttttagaagaaagatggtgatgatggaagcaaatataatggtgcatggtacttggccacatttcaaatgggtgataatgaacattcacctaagtgccacaggtggcttttatttaccacatcaaatcttctttgtgaggaaggctcagcccactaatgtcaagcatttttggtggttcctagatagatgaacaaaacctcactgggctgttttaatgagaccagaattaaaaacacccaggtgccaggttattaagaacatttttacacttgtggaaaaaaatgtgatgtggcgtgtggcttggtttgaataaatcttcactgaggtaagtagctgattgaatttacctaactgtaggttaagaaatgaaaataacctctgaccaagtttattttacaggcttatttctgtacatataaaatagatggctagataaacatatacacataaaatgagtcacatggatatgtctacgtaatgtttatttgtgcatagatctcacaaacaaaaaggctcagaaataaagcagatcagatgacatctccgtattctacccctgaagccgaggtaaattaaataagcaaattagcagaacccaggtggttgtaatcagccaatttgcacagcccaggtgattccaaccagcaaattagctcagatgaggtggatccaatcatccaattatctaaatagagactgtggctttatcaaggcaggccccaaatggtggatgtgaacagaacatgcacacactgaggagacatgcagggcactgaaatactaacctggacagataagttacatggttttattttcagcttatttctgtagacttgcccttgaagttaaagctttgttgatatttacataaacaacattgtatggctacgttccattctgacatgttacttagcaaaagaaaaaagaagtaattctacatcagcatgtttagtgcatgccagaagattaaaaatgtcttttggggaatgtattttgtatacataagtatttacatataaatatttatataattatgtgtttgtcttcctatgtatatttatatctagatatgtcaatcttcgtattgatatgcattgctacaaatagtaagataaagagtaacttccagccgggtgcggtggctcgtgcctgtaattccagcacactgggaggccaaggtgggtggatcacctcagctcacgagttcgagaccaacctggccaacatggtgaaaccctgtctctattaaaaatacaaaaattagccgggcggggtggtgagtgcctgtaatctcagctacttgggaggctgaggtcagagaatcatttgaatcttggaggcagaggttgcattgatccacgattgtgccactgcactccagcctggcagacagagcaagactctgaaaaacaaaaacaaaacaaaaacaaaagtaacttccatatatgtataagtttatctgccctataaacaatatcacaaatattacacaaataaaaatatgctctaacatacatcgtgcctcatttaacatatatgaaagcagcagctttttttttgtttgtttcttgcttctgggagataaaaatgcactaaggtgatggaagtcattcattgccatatcaatgtttacccttctctttctgttgcacacagggcaaaagctgaaccagcctcagtctaaagtttctcaccaaaatttgagaatgtttattctttttcattaagactttcatcaagacaggggctcttgtttatttccatgagtgtgcaatgtgaaagtacactgttgtccttttgcctttgtggctaaaatagggactttatggtaatggacagaaagcctaggtttcttttttttttctttgtttttttttttttttgagatggagttttgcttatgttgcccaggctgcagtgcaatggcgcgatttcagctcactgcaacctccgcctcccaggttcaagtgattctcctgcctcagcctcccaagtagctgggattgcaggcgtgcaccatcacacccggatacttttgtatttttagtagagacggggtttcaccatggtggtcaggctgatctctaactctcgaactcaggtgatctgcctgcttcagcctctcaaagtgctgggattacaggcatgagccaccatgccccaccaaaagcctaggtttcttattagtagactgtcatactgaaagcaaatataatggtacgttacttggctgcatttcaaacaagtgatagtgacactacactgaagcaccaaaggtggttcttattggtcaggccagagctccttgtgaaaaaggttagggccactggcatgtctgaaggttcctagctggatggacagaaccccatgggctattttgaatagacactgaatttaaaacaccttggtggccagtaatgaggatattttcacatttagcaaaacgtgatttgatgtgtggcttggagttgataaatcttcactgaggtaatggctgattggatttacccggcctgaatggaaaataaaataaaaatcacctctgacctattcttctttgtggtcttttttatgcacacagatatatatatatatagatagatataagataggtggctagataaacatatacacagaaaatgggtaacacaggtatgtcagtgtaatttccattattgcatatgtcctgcagagaagcctgagaataagtaggtcagacgccatttttcttcccaacttcttcacaccacgtgaatttaatgagccacttagatcagcgtagatggatataagtcaattagctaaattgggaaagtgaaggcatccaggcaggacccaaatggcaaatatgaatcacattggcatacggtgagaaaggaagcagggccctgaaatgctaagctggaactagagtcttatatggctttaccaaaaacatacttcccgggtcatgcacctaaaagtgaaggtttgttcatgtttaaacataacattgtatggctgtggtccaatctgagatggtatggatccgtataggtgagagtaagtttatatctgcatcctcaatgtaggctggggaacttaaaatgtttgttaaggccgggcgcggtggctcacacctgtaatcccagcactttgggaggccgacgtgggcggatcacgaggtcaggagatcgagaccatcctggctaacacagtgaaaccccgtctgtactaaaaatacaaaaaaattagccgggcgtagtggcgggagcctgtagtgccagctactcgggaggctgaggcaggagaatggcgtgaacctgggaggcggagcttgcagtgagccgagatcacaccactgccctccagggtgggcgacacagggagactccatctaaaaaaaaaaaaagtttgtttattaatatcttttgtacaaataaatatctacgtaggcaaacccacataattctatatgtgtgtgtttatctgtctacccatgtatgtctatatacagatctagctatcattttttccatatgaatacagagtaaagatataggaggtaaaaggataaataggtatttgtacttatagcaatgtaaagaaaaacttcaatgactgcaaaatcttatttgccccttaaattttatccataagagtacacaaatggaggtatactctgacctgcatcttgctgcatttgatgttttcaaagaaagaattggtttttgttgctcacaatctgttagcaaaagtgcactaaggccatcgagtcatttattgccaagtcaaacatggcctttttaattctggtgaatgggaaaatatggataaactagccttagcttgaaagccttaatccaaatttgcaaatgagaaataattctctttaaagcttccctcaattttagagcttttattttcaaatatgtgacatagaaatagaatcttcttctctttctttctttcttttcttttttttttgagacagagtctcactctgtcacccaggctggagtgcagtggcacgatctcagctcactgtaacctccgccttccaggctcaagcagttcttctgcctcagcctcctgggtagctgagtttaaaaccacatacgccaccgcgcctggctaattcttgtatttttagcagagatggggtttcaccatgttggtcaggctggtctccaatttctgaccttgtgatctgcccacttcagcctcccaaagtgctaggattacaggcatgagatactgtttccggcttttttttttttttttttttttttttttttgcagagtttcactcttgttgcggaggctggagtgcaatggcaacatcttgactcactaaaacctctacctcccaggttcaagtgattctcgtgcctcagcctcccgagtagctgggattacaggcacccaacaacacacctggctaaatttgtatttttagtagagacggggtttctccatgtgggtcagcctggtcttcaactcctgacctcaggtgatctgcctgcctcagcctcccaaactgctgggattacagatgtgagccacagtgcctggcagaaatagaatcttatcatattgttgtgtttgctcaagtagtaacattttgggtaagaaaattaaacaagaggtctctgactttaagatggactgctatactgaaagcaaatttcagggtgttttcagatgcttttttctttggatttagatacagatataacatatgtagctagagaaatatatacagccaggtgcagtggctcatgcctgtaattccagcactttgggaggccaaggcaggtccttcacttgaagccaggagttcaagaccagccaagccaacatagcgacaccccatctctactaaaaatacaaaaattagctgggcatggtgagaccagctgagccaacatggcaaaatcccgtctccactaaaaatacaaaacttagttgagcatggtagtacacacctgcaatcccagatactaggtaggctgaggcatgagaattgcttcaacatgggaggtggaagtttcagtgaaccatgatcacaccacttcactccggcttgggtgacaaaatgagactctgtctcaaaaagaaaaaaaaaaaaaatacaaagacccagggtcatagaaacatatagagacatacatatgtaacctgaatttgtgactatgttttataacatctcacaaatgtaaagtaagtcagaggttatgtccgtactcatgctcctcaagatagatgaatgcgattccatgaggcaaatttaataagccaatgagctcaagtcagctgttttcaatcagccaattagctgagcccaggcgattcctattagccaattagctcagcgcaagtgattccattaggccaattatgtcagcttaggcaattacaatcagtaaatttgctcagcccaggtgattacatttcgccaattgactcaatccaggtgattccaatcagtaattcgctcagcctaggtgactttaaacagccaattagctcagccttaacaatttcaatcagtcaatgagatcagcccaggtgactctaattggccaattaactcagcctcagtgatcctaatcagaaagctcagctcatgtaattttattttacttttttgacggagtctctcactctgtcgtccaggctggaatgcaatggcatgatctcggctcactgcaacctccacctcccgggttcaagggattcccctgcctcagcctcccaagtagctgggattacaggcatgtgccaccacacccagctaattttgtatttttagtagagacaaggtttctccatgttgtgcaggctggtcttgcactcccgagctcaggtgatccacctgcctcggcctcccaaggtgctgggattacaggcatgagccaccgcacctggctagctcatgtgattttaatcgggaaattagctagagaaattctagagaatccaatcagccagttagttagaactgtgattccaatgagtcaattagttcagttcagaagtatctaattaaccaattagctcaggttagttgatttcaataagacaaatagttctgcacaggtggatcaaatcagccaataatctaaatagtgactgtagattcattagatcagaatggcagatttaaacagcatttttctacactgagaagaaaagcagggcccaaagactctaatctggtcataaagcattacattgctgtattgtcagcttgtttccaagaccttgcctttgacagtgaagctttgtttatgtaaacatcattgtatgtctgtgttccattatggatttctattgtgccataaagtagactagtaagtccacatctgcattcttagtatatactaaggtattaaaaatgtcatttgctgaaatcttgtatattaataaacatttatgtaattataattatataattctgtacgtgtgtgtttatctacctacatccagatgtatccaggtttgtacctatattcacaaaaaataaagatgtagaaggtgaaagtgttgatcgtaattgatatcaatagtaatatacaaagataattccatagaggtataaaattttctgccgtatgaaatatacctagaatgctactcaaatggatgtatgctattacctaaatctatcatcatttaacttatacaaagtaagcatagttttttttttttaatggagtcttgctctgtcaccaggctggagtgcagtggtgctatgatcttggttcactgcaatctccgcctcctgggttccagtgattcaactgcctcagcctcctgagtagctgcgactacaggtgcctgccaacaggtctggctaatttttgtatttttacttagaggcaaggtttcaccatgttggtcaatctggtctcaaactcctgacctctggtgatcagcccacttcagccttccaaagtactgggattacaggcgtgagccaccgcgcctggccagacactttcttctgtagatttggaaacagatataagacacatatggctgggcatggtggctcacacctgtaatcccagcactttgggaggccgaggcaggcagatcatttgagatagggaattcaagaccagcctggccaacatggagaaaccttgtctctactaaaagtacaaaaaaattaggtgggcattgtggcacatgcctgtaatcctggttactcaggaggctgaggcaggagaatcacttgaacccaggaggcagaggttgcagtgagctgagatcatgccattgcactccagcctgggcagcaagaatgaaactctattttaaaaaaaaaaaagacatgtatataggaaaacataaacaaacacaaaggcttatatacatatgtctaattaatgcctatttgtgagtatgtcttgacaaaaagccccaaaagaaaagtatgtaaaaggttattaccttactcattctcctcaagacacaatcaatgaactcagcccatgtgaccctagtcagccagttagctcagcccaggtgattacaatcagccaattaaacgagcccatgtgataccaattagtcaattatatcataaaggttaatacaattagccaattagattagcccaaggtgattccaatcagccaattaaatgagcccaggtgataccaattagccaattatatcagtattggtgtgttggtgtgatcagacccaacaccgggttgtgggggtgacaaagtccagtggagtcaaaggattgagaaaaagtttgagagagaaaagtgggaccagggggccattgctagtgtatggaggctgcgaaggccccgagctctgggatgccatgctatttattggtaatccaacaaagaaacagatggtgagaatgtggggtcgaaagggcaagtgcatgatctacagctgtgatggtttagcatatgctctgctacttgagataatggagagcaggttcttttaactcaagatacagtcaatcctggaagagcaaggagcaaggagccagcaagtctagacacattccagggccacgagccctggattctattcaagccatgagggattttatgccctgggcttagattatggtgcttcagtgtagccttccaccctttagcacagagcttggtgttccaaaggccacagaagtttttataccctggaccccagacatgttccaagactcttttacattatgtcagacatgcaagccctgcctcagcttctctcccaacactcagcttttctcccaacatgccccccttttctttttcataaaaccgccacagctatcattgcttgttcttgaagtcagctttctctcagaggtggcttcatcttcagaggcagctttcgcatctgcagactaaaagaagacagcacaagcacacaaccaccagaacaaaatccacaaatgtagagcctccaatggccttcaactataaatcttttagaatgggataatagttttttaagggtctcagttacaatataaatagatggtgatgtctccatggtctatttagaggtacagggatccaaactccttctctggctttaattatcaagatagtttgatttttatcaaaggttgaattaatgtaggtaaacaagtgacattcggggcaagtaataaggcatatatttatatcaagagtaacatttcctattgctagcacaactttgaatccaaaaggtcctgttggagagaaaagaaagagcatttttatccttaccttcctcccctctattccttgtatatttgccctctcagattttgcttggactttgagccatagctaatttccataattcagaatgttcctgtctgtccctgcaaatctctgctagtctttgctagcctcaacttttgtacctctttagggcactgaccttatattgctagtctttgcttttgtacctctttagggcactgatcttatattgctagtcttcatctatctctatttatctctatctctctatttatctctgtttatctctatctctctatttatctctatctctctatctctatctctacttatctctagctctacttacttagctctacttacttagctcttattcaaaatggagttgctctggtttgaattcttcccacatatctcccttttcccttttacaagaggacccttaatcctaggggttgcagaaggatgaaggtccatcttctgtaacttcttcatgctgaataggagtgacgataatcctgcctaactattagggactcttgtattcagggtagagaggagctcagtcagaaagcattggtccgttaagcatccataggtaaaaccctggcattccagtagtttctcagcttcctgtgctgttttcttgctctgtcccatgttataggggttgcatccacatggtttcattcatctcctgcaaaaacacaagcgtaccctcgatcccacattagtaaacctagcgaaacagaagcaaaaagttttgtggttgtaactgggaggcatgccattgctgaagcatttgttaactcagcttctgcctctttggttaattacagtgaggtaaaactttccactgataatgagaaacaggccccttctaacagaaggcacagagaaagcaaatcaaggcttctcaaaccttcaatttgcactgtaccggtgggcccactagatgctgtggctcatgatagatcttcagatatttggtgggtaccccattgttgcaataagtctctaccccataaattgactggaagaggtgtaataatatgctgaattgtcccttcctgaccaggtgtcccttgacatggtaaaatcaaggaactctgaaaaacttcctaggctgttcctatgccaatgatacccatggaagcctttagtttgggccagtgctggggccattgatataaagcaataatagagacaccagctccagtatccactagtccttcaaaatcctttccctgaatagttactgtgcaaataggtcttttgtcaaacacttgaataacccaatatacagcctttcttgctgaattagtactaccaaagcctcctgttcttttcactgtgctgcttcctggttttatgtaaggtaagagccacaactgagcaattctttctcctggggaagcagaccacggagttgaggaactaataactaattgaatttctccactataatcacaatcaattattcctgtatgcacagcgacacctttcaaatttagactagaccttccaagtaatagatgaactgttcctgagggtaagggtcccctaactcccatagggaccttctttggttgctcccctggaagtaaggagactggaattgtgctgcagaggtctacggcagcactgcctgctgtgcaaggaaacaattgttgtacatttgtaagggcactggctgtgtcatatatgcctcagtttgttgaggtgctctctgaataaacaagcctcagattccactgggtcttaccgcatgcctcaccctcttcataataaattccttaagaaattcaagtaagcagaatgtttgctttcactttgtgccattgttatcctggttcttccgagcattccgctttcctaccgagcttcttttagttgtccttgggtgtcctttgaggatgcgtcatccactttcacacactgtagggtttcttcaccggggtctctgttgccccacattgggcagccaggaatgttggggtaatcagacccaacaccaggtcgtgggggtgacaaggtccagtggagtcaaaggattgagaaaaagacagtttgagagagaaagatgggaccaggggccatcgctagtgtatggaagctgtgaaggcccagagctctgggagcccacactatttattggtgatcaaacaaagaaacaggtggtgagaatgtggggttcgaaagggcaagtgcatgatctacagctgtgatggtttagcatatgctctgctacttgagataatggaaaggagattcttttaactcaagatacaatcaatcttgggagagcaaggagccaggagccagcatgtctagacacattccagagccattagccctctggattctatccaagccacgagggattttatgccctgggcttagattatggtgtgtcagggtagccttccatcctttagcacagagcttggtgttccaaagaccacaaggggttttagaccctggaccatggacatgttccaagactttttacattatgtcagacatgcaagccctgcctcagcttctctcccaacacccagcttttctcccaagaatggtgaatctaattagccaattagattaacacaaggtaattccattcagccaattttcttagtctagttagatccaatgagccaattatctaaatagtgactacaggtttatcaaaacaggcccaaactagtggatgtgaaaagcacatacaaacattgagaaggaatgcagggtcctgaagtgcaaacctgaactgcatgagtaacctgacttagtgtcagcttatttctgaggcctatgctactgaagattaaggattttttatgtttataatattgtatgtctatgttcaattctgaaatgctactgagcaaaagagattgaaagtaattatatatctgtaattatatatcaattctgaaatgctactgagcaaaagagattgaaagtaattatatatatgtatataagttctagatccatgaggatctagaactagaaatatgatttgacccagccatcccattactgggtatataccaaaaggattataaatcatgctactataaagacacatgcacatgtatgtttattgtggcactattcaaaatagcaaatacttagaaccgtcccaaatgtccatcaataataggctggataaagaagatgtggtacatatacgccatggaatactgtgcagccataaaaaagcatgagttcatgtcctttgcagggatatggatgaagctggaaaccatcattctcagcaaactatcacaaggattgaaaaccaaacaccatatgttctcactcataaggggagttaatcaatgagaacacatggaacagggagggaaacatcactcactggtgcctgttgggaggtggggggttgggggagggatagcattaggagaaatacataatgtaaatgatgaattgatgagtgcagcaaaccaacctggcacatgtatgcctatgtaacaaacctgcacattgggcacatgtaccctagaacttaaagtataataataaaaaaagattttaaaaatcatattcttaaagagtgtaagctaaaaggcagctagttgattctacaaaggtcagaaaattgacttgtgtgtaagaagcctcactgatacaagctatgagatttgggatcactgcttgaattcatggagtctatcaaaatatcattattcctttccactttgtagaatcatgagtcctaagggtaaataatatacagaaataaagtaaaatcagaagcttcaaacacttaacatcttcaaactaatagtacctatagtgtcaaccagagaatataagggcaaccagcaggtggtggaaatatcagcaaacaaaagaaggttggtgtaaaccagctggccagagttctgtggaaagagaatagttgccaagagcaagagaaattaagtctatcatttttcctacctggaaaccaccaaatagaaatgcctgttatactggaagtaacttgtaaaacagaaggttgttgaagaggtggggatgtcattaaaacattttaaaagcccataaaaatcttaggaaaatttcttactcttcaagaaagctttaagagtacatccagcatgggccacatgtatctaagattactcagatccagctggtttctctttgacactttatggcaaactaaaatctatcttccaaaaaaacagtgaagcattgaccttagatatttaattgtctattgagatgacaactcaatgaccttgtctagtttggaaaatacaaagaaatagccatttaggtaaccgtatatgagccagaatttggtggaatctaatcttatatatggccctaactctgaccattaatgagatgttgggttccattagttcattttatttaaaaattggaaaacatattaattcttgcaatagtctcatccctatgcaagcaggtgtctctttgcttatgaagataattagaccataggtttgatggcactttgactttaaaaaaaagacttactaggttgttttttttttttttccaaaaaaaggagagacagtcctgattaggtctctgttgccaaatcctaaagattctaggccctataaagtgagacattaaaaggattatgcatcataataaggccattctgggtaaagtcatttctattcatctccattactttgagagtaatctgtcaaagacaaattaactgccagaggaaacttatgaaaaaatatttgttctcaaaagctgtaacgtatttattttaccttcagtctccacttgccaaaaccataaattgcagaatatctccattaaagctcatgccaaattccaagtctctcctctggctgtcatttgcgagatggctcctcttcaggttcctgttagctatgtgcaaagacagcctaggcaatgacaaatcaagagataaataatttctgagatttcctgagttgattctttcgatcccagcactgcttttcattagaatttctaagtccctcttcctataacagaactaccagccccaatgtgcttgggagcaacttatttgctctggaaattagcacaatatgaagactcaaggctgagacctacaaaacttgggttcaagttaagttgttttttgtttgttttgtttgtttttatcaaatgggagtatgactttgagtttatcacctcacatcctacttggaggatccaaagcatttttctttgagcgtactcttgagatatcataaatacaatcccattgttaggagaggtcccagagcccaattccaacccacttgtccttgaaccttctctaaaacaacctgaaaaagaatggtcttggagcttatgcctgaaagcttccatgccagagaactcacccccacccactgccaccaccagaaaaccagtccagctgccctgtttgtttggtttgattcagttgtgaagcagctttgtagagagtgaagagcaagatactagaaggtacacaaacttcagtgttatggaaaattgattgtatttctatcctatgactaattatttgtcctcacttttgtttacaaaatagaaggctattataaccttgtgtcttacaagtttggtgataattacaaacaggctaagcattcagtaaaacatcatttttctcctatttgctctaactgaagacaggattactttgaatgaccagaacagtcgtatgcttgcaatagctaatttacaataactctagagttcttgaagtttgccctagggcattaaagatgccaactatggcctatgagaaatatcaaagcatgagacaaggccattcaataagaagaggtcagaaatttctcaactgctgcaaaattttttagcaataaactcatttctggtaagtcttttacatcacccactcctacctttacatacaaatgtgaattattacctaatttttgtatcagtgaaagaatttgaggatagcctgaaatgatattgtgggttttggagcttacaaatcttggagaaaacttatctcagagtcaaacatggcctggtgattacctaattcccaggtaggcctgtaaagtctctctgcgatcctgctggcaaatgctccctgtcttcattacacaagaccagccacggaaacaaatgggtatcagttattttaactccaactcttagaaagtgcttgtatttaagtttttgatcaaatgtatctattcatatgttttggaaaattaaatcgaatagagagattaaaatgaaaaataaacttcctgccccatgcctaacagtctctaacctcttttcgtacaggctaactgtgtttggccttttctgcattgctacagagaaatatctgaggctggataatttataaagaaaagaggtttaattgactcctggttctgcagcctgcacaagaaatgtggtgccagcatctgctcagcttctggtgaggcctcagggagctttactcggcagaaggtgaaacacctcccaccaggcctcaccgccaacactggggattacatttcaacatgagatttggaagggacaaatatccaaactatatcagtaacactatttaactcttaaaactatttctaggctgggcatggtggctcgttcctgtaatcccggcactttggaaggcaggtcacttgaggtcaggagtttgagaccagcctggtcaacatggtgaaaccccacctctacaaaaaatttgaaaattagctgggtgtgatggtgcatgcctgtaattgcagctactcaggaggctgaggtgagagaaaggcttgagcctggggggcagaagttgtagtaagccaagattatgccaaggcactccagcctgggggatagagcaagattctgtccccactcccacacacaaaaaaaagatttctaaacttatatttctgattatcatccacctttaatctgttattgcactatattccttgattaatttgaaatagcatttactgacgcgctattctgacaaaagatttaacttccttatatcatcccaagccttcccttaatactcctgccagtatgattctttgcctactttttttgtttttctattaattacttttgtaactttaaataaatgttcaccattatatttctttttacagcaactataggaaatacctcttctctagttgagataaagtttattctctaatttactaatgtttcaaagatcacctgaccttatttgcagagataatattttttaaatctcaaccttgcaaactgtcagggttgataatatttgcattcctttccaagatgatacctgtcttctgtcctttatctatggtttattatgaaagcaggaagtgaatcatgttttgtttgttattcctcttccaagtactatttgctgcagaaccaagcccttgtttaggattaattttgtgggttttgtatagctatttggatttttctggagtttctaattctcttcttacttcttcatattgtctttaatatgtttttaagtagttctatcttcctagggatcatatgaaatctatgaaacaccattttttacaaaatgtctccttgttggagcctctgttttcttccttctgtctggagtgctgcttccaggcctgctccaaagctgcatcctggcactcctccttctctcggtcaccctggatccacctttctttggatcccatgtcttccacattcttagcctcctcattttgcttaagaaaatcatccagtaacatcctaagaaagtttgaggagaaacttcttagtttctgtaaatatttttttattctctattcatccagattgagtgtttggcttggtatttttctctttttttggttttgcaatgcatttttctcttttttataatactttaagttctagggtacttaagttctaggtttgttacataggtatacatgggccatgttggtttgctgcacccatcaactcgtcatttacattaggtatttctcctaatgctatccctcccccagcccccaaccccctgacaggctccagtgtttgatgttccccaccctgtgtccatgtgttctcatagttcaactcccacctatgagtgagaacatgcggtgtgtggttttctgtccttgtgattgtttgcttagagtgatggtttacagctttatccatgtcactgcaaaggacatgaactcattcttttttatggctgcgtagtattccatggtgtgtatgtgccacattttctttatccagtctattattgatggacatttgggttggttccaagtctttggtatattgcatagtgccaaaataaacatgcgtgtgctgtgtctttatagtagcatgatttataatcctttgggtatatacccagtaatgggattgctgagttaaatggtgtggctagtcttaaatccttgaggaatcactacactgtcttccagagtggttgaactaatttacactcccacctacagtgtaaaagcattcttatttctccccatcctctccaatatctgttgtttcttgactttttaattatcaccattctaactggcatgagatggtatctcattgtggttttgatttgcatttctgtaatgaccagtgatgatgagcattttttcatatatctgttggctgcgtaaatgtcttcttttgagaagcatctgttcatatcctttgcccactttttgatgaggttgtttgtttttttcttgtaaatttgtttaagttctttgtagattcgggatattagccgtttgtcagatgggtagattgcaaaatttttctcccattctgtaggttgcctgttcactctgatgatagtttctttcactgtgcagaagctctttagtttacttagatcccatttgtctattattgcttttgttgccattgcttttggtgttttatttacgaagcctttgcccatgcctatgtcctgaatggtattgcctaggttttcttctagagtttttacagtgttagctcttacatttaagtctttattccatcttcagttaatttttgtgtaaggtgtaaggaagggatccagtttcagctttctacatatggctagccagttttcccagcaccatttattaaatagggaatcctttccccattgcttgtttttgtcaggttcataaagatcaggtggttgtagatgtgtggtgctatttctgaggtctctgttctgttccattggtctatatttctgttttagtaccagtaccatgtcatcttgattactgtagctttatagtatagtttgaagtcaggtagtgtgatgtctccagctttgttctttttgcttaggattgtcttggctatgcgagctcttttttggttccatatgaaatttaatgtagtttttccaattctgtgaagaaagtcattggtagcttgatggggatagcattgaatctataaattaccttaggcagtatggccattttcacgatattgattcttcctatccatgagcatggaatgatcttccatttgtttgtgtcctctgttatttcattgagcagcagtttgtagttctccttgaagaggttcttcacatcctttgaaagctggagtcctaggtattttattctctttgtagtaattgtgaatgggagttcactcatgatttggctctctgtttgtctgtttttggtgtataggaatgcttgtgatttttgcacattgattttgtatcctgagactgctgaagttgcatatcagcttcagcaggttttagcctgagatgatggggttttctaaatatacagtgtcatctgcaaacagagacaatttgacctcctcttttcctaattgaataccttttatttctttctcttgccaattgccctggccaggacttccaatactatgttgaataggagtggagagcgaaataatcattgtcttttgcctgttttcaaagggaatgcttccagtttttgcccattcagtatgatatgacaaactgtaggtttgtcataaatagttcttattattttgagatatgttccatcaatacctagtttattgagagtttttagcttgaagcattgttgaatatttttgaaggacttttctgcatctactgagataatcatgtggttttttttcattggttctgttaatgtgatggattacctttattgatttacatatgttgaaccagccttgcatcccagagatgaagccaacttgattgtggtggataagctttttgatgtgctgctggattaggtttgccagtattttactgaggattttcacatcgatgttcatcagggatattgacctaaaattctctttttttgttgtgtctctgtcaggcttttgtatcaggatgatgctcacatcataaaatgagttagggaagattccctcttcttctattgatggaaatagtttcagaagaaatggtaccagctcctctttgtgcttctggaagaattcagctgtgaatctgtctggtcctggacttttttggtgggtaggctattaattattgcctcaatttcagaacctgttattggtctattcagagatccaactctttcctagtttagacttgggagaatgtaaatgtccaggaatttatccatttcttctaaattttgtagtttatttgtgtagaggtgtttatagcattctctgatgacagtttgaatttctatgggatcagtggtgatatcccttttatcattttttatttcatctatttggttcttctctcttttcttctttattagtctagctagtggtcttattttgctgatcatttcaaaaaaccacctccaggattcatcgattttttaaaggttttttttttgtctctatctccttcatttctgctctgatcttagttatttcttgtcttctgctagcttttgaatttgtttgctcttgcttctctattcttttaattgtgatgttagggtatcgattttagatctttcctgctttgttttgtgggcatttaatgccataaatttctctctacacactgctttaaatgtgtcccagagattctgatacattgtgtctttgttctcactgatttcaaagaacactttatttctgccttcatttagttatttacccagtagtcattcaggagcaagttgttcagtttccatgtagttgtgtggttttgagtgaatttcttaatcctgagttctaatttgattgcactgtggtctgagagacagtttgttgtgatttctgttcttttacatttgctgaggagtgttttacttccaattacgtggtcaattttagaataaatgcaatgcggtgctgagaagaatgtatattctcttgatttggggtggagagttctgtagatgtctatgaggtctgcttggcccagagctgagttcaagtcctggatatccttgttaattttctgtctcattgacctgtctaatattgacagtgggatgataaagtctcccattattattgtgtgggagtctaagtctctttgtaggtctctaaggacttgttttatgaatctgggtgctcctgtattgggtgcatatatatttaggatagttagctcttcttgttgaattgatctctttaccattatgtaatggccttctttgtctcttttgatctttgttggttcaaagtctgttttatcagagaccaggattgcaacccctgctttttttttttgctttccatttgcttggtagatcttcctccatccctttattttgagcctatgtgtgtctttgcacatgagatgcatctcctgaatacagcacaccaatgggtctttactctttatccaatttgccagtctgtgtcttttaattggggcatttgaccccaatatatttaactttcttcatgaaaagcaaatttttgctttttttacacactctttatgcagaattgtttttcttagatctagtagtttttattatatatattaattacattaactcttaaaaacctaatttttagtgaaatccctaggaagtaattttggagtgtttggcatcagtatttgtagacaaaaaccattttatatttttaatagaagtttttttccaaattctctgttaattagcagatctaaatatgattagcttttctatatcatataaaaataagattctggtcaggcatggtggctcatgcttgtaatcccagcattttgaaaggccaagacacaaagattgcttaagcccaggaattcgaggcaagcctgggcaacatggaaaaaccccatgtctacaaaaaatacaaaaattagctcagcatggttacctacaccggtagtaccagctacccaggaggctgaggtaggagaattgcctgagcccaggagattgagagtgcagtgagccatgataaaggcacttcactccatcctcaatgacagagactcttttttaaaaaattaaatgccaaagcagataaagtagaacttattggactttgggggctggggcttgtttttattattatctcaacagctttgtggctacaggtggtgtttgattacataaaagtttttcagtggtgatttctgagattttagtgcacccatatcccaagcagtgtacactgtaccaaatgtgtagtcttttatccctttctcccatctctttcttttccccaagcctctggagttcattgtataattcttattctttccttttttttttgagacagtgtttcgctcttgttgcccaggctggagtgcaatggtacaatctcagctcactgcaacctctgcctcctgggttcaagtgattctcttgcctcagcctcccatgtagctgggattacaggcatgcgccaccacacccagctaattttgtatttttagtagagacaaggtttctccattttggtcaggctggtcttgaactcctgacctcaggtgttccacccacctcggcctcccaaagtgctgggattacagttgtgagccccagcacttggctagctcatgtgcttttaatcaggaaattagctatgttctagagaatccaagcagccagttagttgaaactgtgactccaatcattcaattagctcagttcagaagtatctaattaaccaattagctcaggttagttgattccaataaggcaaatagttctgtacaggtggatcaaatcagacaacaatctaaatagtgactatagattcattaagtcaaaatggtggaagtaaatagcacttttctacactgagaaaaaaagcagagcccagacatgctaatctggtcataaaggattacattgctgtattatcagcttatttccaagaccttgcctttgaatgtgtatctttgtttatgtatctgtaaacatcattgtatggttatgttccattttggatttctattgtgccataaagtatactagtaagtccacatctgaattcttagtatatactaaggtattaaaaatgtcatttgctgagcatcttctatattaatagacatttacataagtgtacttatataactctgtatgtgtgtatttatctgtctaactatatgcagatgtatccaggtttgtatctatattcacaaaaaataatgatgtagaaggtgaaactgttgattgttgatatcattagtaatatacaaagataattccatagaggtataaaattttctgctctatgaaatatacctagaatactcctcaaatggatgtatgctcttacctaaatccattggcatttaacttatacaaagtaaccattggttttttgttttgttttgtctttgtttttttgagtcagactctcactctgtcaccaggctggagtgcagtggtgcaattatctcggctcactgcaacctccacctcccaggttcaagcaattctcctgcctcagcctcccaggtagctgggactacaggtgcctgccactgtgcctggctaatttttgtatttttagtagagatggggtttcaccatgtgggtcagggtggtctcaaactcctgacctgaagtgatcaacccacatcggccttccaaagtgctgggattacaggcatgagccaccgcatccagccggacactttcttctgtagatttagaaacagatataagacatgtatataggaaaacagatacaaacacaaaagcttatatcatatgtctaattaatgtctatttgtgagtatgtcttgaaaaaaagccccccaaaagaaaaatatgtaagaggtcattaccttactcattctcctcaagacgcagtcaatgaactcagcccatgtgattctactcagccagttagctcagcccaggtgattccaatcagccaattaaaggagcccaagtgataccaattagtcaattatatcagtacaggtgaatccaattagccaattaggttagcccaatgaaattccaatcagccaattaaatgagcccaagtgataccagttagccaattatatctgtaaaggtgaatctaattagccaattagattagcccaaggtgattccattcatccaattttcttagcctagttagatgcaatcagccaattatctgaatagtgactgcaggtttatcaaagcaggcccaagctactggatgtgaaaagcacatacctacattgagaaggaatgcagggccctgaagtgccaaacttaacagcctgtataacgtgactttgctgtcagcttatttctgaggcctatgctactgaaggtgaattttttttatgtttatacaaacaatattatatggctatgtttggttctaaaatgctactgagcaaaagagattgaaagtaagtatatgtctgtataattagtatatgccaagtgattgaaaatggtctattggggaacatttcttgtatacataaatatttacataaatatactcatataatcctttatgtaagttttaaaaatctatttacctgcccaggaatggtgactcatgcctgtaatcccagcactttgcgaggctgaggtgcatgcatcatgaggtcaggagttcgagaccagcctggccaatatggtgaaactctgtctctactaaaaatacaaaaattagcctggtgtggtggcacttgcctgtagtcccagctactccagaagctgaggtaggagagtcacttgaacccgggaggcagaggttgcagtgagccaagattctgccactgcactctagcctgggtgacacagcaagactctgtccccatctccaacaaagtaacttctatacatgtataaatctatttgccctgtaaactagatctagaagagtacacgaatagaagaatgttgtggcatacatcctgctgcatttaacatatacgaaggaagcactggtcttttttgctcactcctggaaaatgaacatgcactaaccaatgggagtcattcactgccatgtcaaggttgacccttcccttcatgttgcacatatggccagaggtgaaccagccccagtcctaaggttctcacctaaattgtgaaatgcttattttttctcatctgggctttctttaagacatgggatcaacttcatttttatgagtatgtaacgtaaaagtacaatttggtctcttcatctctgtggctgaagtagtgtcattatggtaacggatagagtctagcactctttctggaagatagaccatcatactgaaagcaaatgtaattaattgttcatggtaccagaacacatttcaaccagaccatagtgaacattcacagaagtgccaattgtggcccttattggccaggccaaaacttctttctgagtaaggatagtcttactgatgtcaagcattcctgctttttttttttttttttttttaactggacagaaacccactaggctgatttattgagattcacaaataaaaagacctgggtgccaggtaacaaggacattttcacatttatgaaaaaaaaagtgtggcttttggcttggattttataaatcttcactgagctaaccatctgattggatttatgtagcctggaagtaaagaaaatagaaattaccttttaccaagtttacttcagtgccttttttctgtaaatgtaaatatggatataagataggttgatagacaaacatacacacaaagaatgagtcacatatgtatgtataggtcaagtttatttgtgcatatgtcccatataggacagaggtcatcttcatttctacccctgcatcccagataagttaaataagcaaattacctcagcctgtgtgattgcaaaaagccaattaggtcagatcaggtaaatataaccaactgattagctaaactggaaaagtgtagacatcaaggcaggctcaaaatgatggttgtgaataacacaggcataccctgagaagaaaagtaaggatctaaaatgctaagccagacataaagccttacgtcacactacgaatgtattacttcacaggccatgctcataaacatgaagtttcttcatgtttatacataacactttatggctgtgttccaatctgagatggtataaaggcatataggtgaaaagtaagtcttcatctgtgtcctcaggttaggctggaaaattagaaatgtctattgatgaacatcttttgtatgcataaatatttacatatacaaactaatataatcctgtatgtgtgtgtttatgtacttacatatatctatagccaggtctatctataattctgttaacattcatacagaataaagatatagcaaggcaaagtataagtgagcagtggttcatgcctgtaatcccagcactttgggaggccaaggcgggcagataatgaagtcaaaagatcaagaccaacctggtcaacatggcgaaattccgtctctactaaaaacacaaaaatcagctgggtatggtggcgcatgcgtgtagtcttagctactcgggaggctgaggcaggagaatcacttgaacctggaaggtggaggttgcagtgagcccagattgcaccactacactccagcctggtgacagagtgagactccttctcaaaaaagaaaaagaaataaagggcatccaaattggcaaagaggaagtcaaactgtcactgcttgtcaatgatataattgtatacctagaaaaccctaaagactcattcaaaaagctcctagatttgagaaataaatttactaaagtttcaggatacaaaatgaatgtacacaaatcaatattgcaggtatacaccaacagtgaccaagctgagaataaaggcaagaactcaaccactttacatcagctgcagaaaaaatatacttaggaatatacttaaccaaagaggtgaaagacctctacaaggactactacaaaacactcctgaaagaaatcaaagatgatacaaacgagtggaaatacatcccatattcatggatgagtagagtcaatattgtgaaaatgatcatagtgccagaagcaatctacaaattcatgccattcttgtcaaaataccaccatcattcctcacagaactagaaaacacaatcctaaaattcatatagaaaaataaaaaagcctgcatagccaaaacaagactaagcaaaaagaacaaatcttgagacatcacattatctgacgtcaaagtatactaggagactattgttaccaaagcagcatggtactggtataaacataggcaaatagaccaatggaacagaatagtgaataaagaaataaagccaaatactttcagccaactgatcttctacaaactaaacaaaaacatgaagtagggaaaagacatcctattcaacaaatgctgctgagataattagcaagccacatctagaagaataaaactggatcttcattgctcactttatgcaaaaatcaacccaagatggatcaaagacttaaatggaaaacttgaaactacaaaagttctacaagaaaacattgggaaaaactcttctacacattggcttaggcagagatttcatgaccaaaaacccaaaaacaaatacaacaaaaacaaagatcaataaatgtgacttaattaaactaaaaagcttctgctcagcaaaataataataatgataatcagaagagtaaacaaacaacacacaaagtgggagaaaatattcacaaactatgcatctgacaaaaaactgacaaagtttctacaagaaactcaaacaaatgagcaaaaaaccccacaaactatcctataaaaaagtgggcttagcacatgagtaaacaattctcaaaagaagatatacaaatggttaaaaaacattttaaaaagtgctcaacatcactaatgatctgagaactaaaaatcaaaccacaatgtgatatcaccttactcctgcaagaatggccataatcaaaaaaatcaaaaaatgacagatgttggtattgatgtagttcaaagggtacacttttacactgctgatgggaatataaactagtacaagtactatcaaaaacagtctggagatttctaaatgaattaaaagtagaacttccatttgatccagcaatcccactactgggtatctacacagagaaaaataagtcattgtttgaaaaagacacttgcacatgcatgtttatagcagcagaatttgcaattgaaaaattgcaaatgttgggaagcaggctaaatgcccatcaaccaatgagtggacaaagaaaatgtggtgtatatataccatagaatactactcagccacaaaaaggaacaaaataatggcattcacagcaaccttggtggagttggagattattattgtaagtgaagtaactcaggaatagaaaattgaacaccatatattctcatttatatgtgggagctaagctataaggatgtaaaggcttaagaattatataatggggagggtgcggtggctcacgcctgtaatcccagcactttgggaggccaaggcgggtggatcacctgaggttgagagttcgagactggcctgaccaacatggagaaaccccgtctctactgaaaatacaaaattagccaggcgtggtggcacatgcctgtaatcccagctgcttgggaggctgagacaagatagcgcttgaacctggaaggcagaggttgcagtgaggcaagatcgtgccattgcactccagcctgggcaacaagagtgaaactcaaaaaaaaaaaaaagaagaagaagaagaagaagaattatataatggactctagaggcttgggggaaagaacaggaagggggaaagggataaaagactacacattgggtactgtgtacactgcttgggctataggtgcactaaaatctcagaaatcaccactaaaaaactttttcatgtaatcaaacaccacccatagccacaaagctgttgagataataataaaaacaaccccccgcccccaaagtcccataaaattaattttatatgctttggcatttaattttttaaaaaagagtctctgtcatcaaggaaggagtgaagtggcttgatcatggctcactgcagtctcggcctcctgggctcaggcaattctacctcagcctcctggttaactggtactacaggtgcaggtaatgatgccgagctaattttgtattttttgtagacatggggttttgccatgttgcccaggcttgcttccaattcctgggcttaagcagtctttgtgccttggcctttcaaaatgctgggatcacaaacgtgagccatcgtgcctgaccagaatcttatttttatatgatatagaaaagctaaacatatttagatctgctagttaacagagaatttgaaaaaacgtctcctattaaaaatgtaaaatggtttttgtctacaaatactgataccaaacagttctaaattacttcctaaagatttcacaaaaaaaattaggtttttaagagttaatgtaattaatatatataattaaaactaccggatctaagaaaaatacttccacatagtgagcaaacataagaaaaatatactttcaatgaagaaagccaaaaatattttgtctagtttgaaattacttaaattgtctcaaattgaaaaaataaaaagaatgtagataaaaataaaatacagaaacttttaaaagtaatttaaaaaaggtcgggtgtggtggctcatgcctgtaaacccagcatttcgggaggccgaggcaggtggatcacctgacgttgggagttggagaccagcctgaccaacatggagaaaccgaatctctactaaaaatacaaaattagccggacatggtggcgcttgcctgtaatcccagctacttggaaggctgaggcaggagaatatcttgaacccgggaggcagaggttgcagtgagccgagattgcaccattgcattccagcctgggcaataaaagtgaaactccaaataaaaaaaaaagtaattaaaaaaagtataagctatgtatggaaatctagagtggtcaaaatgatatatttgatggatttatttataaagttttatgaaaattagcttttaatttttttaaaattttaaaattttaatttttattttttgagatggagtcttgctgtgtcacccaggttggagtgcagtggtgcaatcttggcccattgcaacttccacttcctgggttcaagtgattcccctgcttgagcctcccaagtagctgggactacaggcacctgccaccatgccaggctaatttttgtaatttagtagggacggggtttcacatgttagccaggctggtctcaaactccttacctcaggtgatctgcctgcctcgacctcccaaagtgttgggattacaggcgtgagccactgcgcctggtcaaaattagctttagtattgatagcacactaatacaaaagtataagttgattttctcttgaacaaaaattttgtgtattattactataacacaataacctatttttattcaccttttgaattaatttaaaaagagggagagtagagatgggtttttctcatgctgtctttcttgggtcatttgactggaaaactgaatttcctgcatcgaacagtaaaaggttttgtttttataagtcttctaataggccaggcactgtgactcatgcctgtaatctcagtactttgggaggctgaggcaggcggatcacctgaggtcaggagttcgagaccagcctggccaatatgccaaaagcccgtctctactaaaatacaaaaattagccaggcaaggtggtgaccgcctgtagtctcagctacttgggaggctgaggcaggagagttgcttgaacccaggaggcagaggttgcagtgagccaagatcacaccactgcactccagcctgggtggcagagtgagactctatctcaataaataaataaatacataaataaaaataataaataaatcttttaattattgctttggctaaatgaatgattattatttaatagtggactgtgatcccattttgttcaagtattttaaccctttgacatatttggcaggcttcccaaaattaaaattcagcttaaaagttgtgtgtatttgacccctaatatttgaatgctacataagtccaatgcagcatttgaaagagtgataaacagaattctttgatatgttaaattacatggaaagcattgtcaaattaaaaatttgacctttatcaacatattttaataaatgttatgatattcatttcaaaattatatgaaatctctaaaaatccaatgtatctgagtatatgctactagtaataattatggtttttatgataaattattatagactacaggtataatcattttttcatttatttcttcataaccattttaagtcattttcacagttaatggtttaattctgatgtagtttctaaaaacttcaaaagcacataacatcctagaggactgtgtctttaaagagttgtacgaaaagatggaaagggtccacacaagttaagtacaggcttctgataattttaggatcatattatatttggactggctaaggattgtgagaatttgaatgaagagacagactcctaaaaaactttgagcccaggctggggtgtggtggctcatgcctataaccccagcactttgggaggccagggcagacagatcccctgaggtcgggagttcaagaccagcctgaccaacatggagaaacctcgtatgtattaaaaattcaaaattaacaaggtgtggtggcgcatgcctgtaatctcagctacttgagactgaggcaggagaatcacttgaacctgggaggcagaggttgcagtgagcaaaactcgtgccatttccagcccaggcaataagagagaaactccatctcaaaacaaaacaaaacaaaacaaaacaaaatgaaaacaaaaacaaacaaacaaaaacacctgtaagcctacacaagacaaaaattaattgactattacaaaaatactgtgccacatttttaaagttatatcaggcagtatggaaatgttttagatatactttgtaaatcaactctgtggtccaagtcaaatgacctatgataacctctcaggtatcagtgctgcgcacctaaatttgggaaagtaacctagtgtttaaaaagacataaacttaatgttcagtgtggactcatggagaacctaggcagccacttgatatttcctgagttctttttttaaaaattaattaattaattattattattattatttgagatggagttttgctgttgtcacccaggctgaagtacaatggcatgatcttggctcactgcaacctccacttcccaggttcaagcgattcccctgcctcagcctcccaagtagctgggatgacaggtggtcacccccacgcctgactattttttgtaattttagtagaaattgggtttcaccatgttggccaggctggtctcaaactcctgacctcgtgatcaacccccttcagcctcccaaactgctggaattacaggcgtgagccaccacattcggaccctattcctgagttcttgaagtttccattatttaaagctacgcatttcactactaatcacagaaaagataaagtaatgtacattaaatataaattgaatgtgtgtttgtgtgtgtatgtctgtgtgtgtgtgtgtgtgtgtgatgactgttctaaattactacactaggttaagaccaattcctttttcaaacttataattcttagaagaatattaaaagtttatgtatgtttctgctacctcatgtgtgatttaaacatttatacagaaactgtcttttatttttttgagacagagtctcactctgtcacccaggctggagtgccgtggcacgatctcagcttactacaaccttggcctcctgggttcaagcgaatcttctgcctcagtctccctagtagctgggactacaggcacacaccaccatgcccagctaatttttgtatttttagtagagacagggtttcaccatattggctaaggtggtcttgaactcctgacctcgtgatctgcccgccttggcctcccaaagtgctgggattacaggcatgagccacttcgtccggcttttttttttttttttttttgactgagtgtcactcttgttgcccaggctggagtgcaatggcaccatcttggctcgctgcaacctctgccttctgaattcaagcaattctcctgccgcagcctcccgagtagctaggattacaggcacccaccactactcccaggtaatttttgtgtttttagtagagatggggttttaccatgttagtcagtctggtcttgaactcctgccctcagatgatcctcacgcctcagcctcccaaagtactgggattacagatgtgagcaccagacagaaaattgcatgcctggcaattgtcatttttaatgcatgttttctggtagtataaaagctttctgatgcaagaaggttgttattatagcggtagctaaaaggatactaagactttcttttcctcatgaagacttgctgaaaaggtctccaattacaaagatacttatttcactagaaaagttgtaaaactgttaaataagatattacagatacaatagtactgagcaaagctaactaaattcactagattgtttttgtaattgcaattgatgacactcagatccacttagagtggaaaaaacgtgttgacttttataaagagtcattggaagacctatgcacctaataatagaacgtcatgtataatctgctactgaagtctaatattactaaatgtggcaaggctctaatgcattatggcaaagcatattttcacaaggtaaagaaagctttttttttttttttgatggtctcactgtcacccagggttcagttttgtgatctcagctaactgcaacctctgcctcctgggttcaagtgattctcatgcctcagcctcctgagtagctgggattacaggtgtgcatcaccacgctctactaatttttctgtttttaggctaggctggtctcatactcctggcctcaagtgatccacctgccttggcctcccaaaatgctgctattacaggcatgagccactgcatctgtccagaaaagcttttaatagtctactgactgggaacaggaaaaccttttataatttagaacaaagagactgaatctgcttgccatctacaatgtagcaagacttcgggactttaaaccttgggttcataacgttacaactcaaaggggaccctctaaactcttgtaatcttattggagattttaattggagatcttgaggtaaagctaaccggagaagtttctcctcaaaagaagatgacaaccttgaggtagaaagctgtttccacaagataaaaaatgaagacctctctgatatcatgacgctcttagttcacagtttctttttttatgcctctacacacaacagaaataaaaaagggatctcttgtgtgctctcatggggtatacttatatatgtaaataattttacagccaacatttaaaaaaacttatgtcttaataggtaaaagatgaagggccactgcgggtgagaaattgtaatgggaaatttgttgcctcataatatcagaaacagaatattgatcaactgctcttggagcaatattaagttaaagataaacttattcagaatagcataaagagcattgccaggaggccattagtcttctgagtgatcatttgttaggtctttttttcaaaggcttagagtaaataaggcaatgattagaaatttatcttccataacaggctctatagcagattccaccataaaggctatggttacacaatagaatttaatatttttttaataaagttgtgctaaataaaataatttatctagtttacttactggataaacagagaagtatctgtgcagttggtagtatttgtagttgcacatggagaaatacatcgagtattacagagattcagttgtaggaaattaatgaacagactgcttggttgaaatgagtagaccatttaactagctaactgtttgatctatttaatcttagttggttggttcatgggaaccttggttaaaaagcatacttctggtcgggtgcggtggctcacgcctgtaatcccaacactttgggaagccgaggcaggtggatcacctgaggtcagaaattcgagaccagcctggccagcatggtgaaaccctgtctcaactaacaatacaaaaattagccaggtgtagtgacacatgcctgtaaccccagctacctgggaggctgaggcaggagaatcacttgaactcaggaggcagaggttgcagtgagctgaggtcgcaccattgcactccagcctgggtgacaagagtgagacttcgtctcaaaaaaaaaaaatcgtacttctaactcttgatattattttcctgataatcaaaatatagtctccctactgcattctattctctcaaaagttataaatctttgcatgcagtcatctctagaatgtcaagtggtctctctttaactggaatgatgaaaacttgaaaatgtatttgaccatgagaacaccataacctatgaatgacctgataagaacggaaatcaaaaataatggaaactgagagtgacactaagatgctgagttttggtcacactctgacctatgtgaaaacctaatcaaaagggggacattttttaaacaaaattattggaggccatcattctggactgagcttgttcactaggctcaaacagaccaaaccaaacaaaaatagagtcattcatgttgaatgcgacatagtcaaactgaaagtttaaagaaataggtggattctaaaactggccaggtcttgtttttctttggtgaaaagcagatttcgatacaaggaggtctcctctactgtaatcattttaaaaaataataacctgaagtacttgttttcactttataaaacccacagttctgctattttacagtggaatttgagactaaataagtacatttttgatggtgacaaagtaatatcaacgcctgaagttttgtttaatttcttgaaattgaggagataaccaaaagggagatattgttaaattaattatagcctaaagctgatcgcttttatgtttaattttgttaataggattttctgtacacagtaaactaaaagctagctgaatatgtaaatagattgtaacttattcttgtaccaaccactatgtttttgccaataaaagaacatcagctggtcaaaccatattccaataaggcaaatcccaagctgtaataaatctggctgtttctgtacctcatttctattttctgtatgtcactttgcttcttctgtatataaatctttttttccacgtggctgtgctggagtctctctgaggctactcgggacccataggctgcttaaaatttgcaaattattctttgctcaattaaactatgtgaaacttaatttctctgaagtttttttcatttaaaagttttcaaatgttttgtatgataaaaagataagttatgtgttgttggactttgattatcaaaaataagttatgttttccaaattattccatatcagctatgtcagctattttttccaagttattctatgttctttcaaaatgcttttgcaatttcttttttgtttttgttttgttttgtttgagaaagagtctcactctgtcacccaggctggagtgcagtggtgtaatcaatcatggcttaatgcagcctccaccttccaggcttaaacaatcctcctaccctagacacctgagtatcatcatgcctggttaattttttaaatttgttttgtattgagacaggatcttactatgttgcccaggctgcacttgaactcctgagcttcagtgattctcccatctcagcctcgcaaagtgttaggattacagatgtgagccaccatgtgcttcagtaatttcttgagattattcccaacaataaacagtactatgtgggcacaaatctaaaagcaatctggtttctatttttgaagtgtcactctccaggattttaagagtctaggacagctacttgaatagtgtgatccatggaggtacataggctttggagtcagagttgatcctgagtcccatcccagccacgtagtagctgtgggtattcagacaatttcttgatatggaagagttctatagaccacatatgcagaaaaagcagaatgggctgggtgtggtggctcatgcttgtaatcccagcactttgggaagccgaggcgggtggatcatgaggtcaggagatggggaccatcctggccaacatggtgaaaccctgtctctattaataatacaaaaattagctgggtgtggtggtgtgggcctgtaatcccagctactcaagaggctgaggcacaagaatagcttgaacccaggaggcggaggttgcagtgagccaaaatggcatcactgcactgcagcctggcaacagtgagactccctttcaaaacaaacaaacaaacaaacaaacaaagagacaaacaacagcagaaggatactgattacaaatatggtagcaatttttcatccctcctgtattcatgtccattgccaggtgcttttacagccattcccatcaagattcagaatctattttccaaacacttgatctggctggccttttttgcttagggcagtagaaacctgggaacatgacaatgtcttattttggggcctaggttcaaatagtgttggctacttctgtttttcttttctctctttttttttttttctttttttgagaaggagtctttctctgtcaccaaggctggagtgcagtggcgtgatcttggctgactgcaacccccatctcccaggttcaagcaattctcctgactcagccccctgagtagctgggactacaggcatgtgccaccacacccagctaatttttgtatttttagtaaagacaaggtttcaccatgttggccaggctggtctcaaattcctgacctaaggtgatccaaccaccttggcctactaaagttctgggattacaagcgtgagccaccatgctgggcctgcttctgtttttctttcagaatgctgccatcttcatgaaacaagcccatattagccagctggaggataagataccatggggaggagaagcaagttgcccctgttgacagccccagaagcagaagctcacccctagaagcacagctgccttcctagtcaatgagcagctcatgatacatgtctaaagaagctcagctgagaacagaagaatggccccactgagtccagcctaaatggctgagcagttcaattatgagctaatcagttttggatggtttgttatgctgcatagctaactaatacgtgcacccagtgcagatagaatgccaagatttaatgacaggttggttactagttaccttctaatgctgagcagcataaaagtactgatatttttccctatttaaagttagatgtcttgtaagataatgttgagaaatgcagaaatgtttttttttgaaatgcagaaatattgctgggtgtggtggctcatgcttgtaatcccagtactttgggaggccaaggcgggcagatcacctgaggttgggagtttgaaaccagcctgactaacatggagagaccccctctctactaaaaatacaaaagattagctgggcgtcgtttcacatacctgtaatcctagctactcatcaggaggctgaggtaggagaatcacttgaacccaggaggtggaggttgctgtgatctgaggtcatgccattgcactccagcctgggcaacaactgcaaaactccgtctcaaaaaataaagaaaagaaaagaaatgcagaaatacatgtggacatgtatgcatgtgattggcgcttatattcactcagtttcccacaccacaggagaaaacggataaccccagcctgaccattagtgtcaaggccaaatagcaaaataagtttgcctttaatctattttcttcctagtaaatattaaaggtccagacagtgtagagatctcaagacatagagttttcttctcttgttgccccatcatcctttgttcactgtctgttctctgaaagaaaggtgggcaacagtagtaagcagtggtttacctgtggttatttcattcctgctgccctcaggtgtggtgttgattgaggtctttggctcactctttatttttattttttagtcaggtcgtttgttttattgttgtctgaaaattatttctatattttggataacaatctttatcagatatatcttttgcaaatattatcttccatactgtgtctttcttttcattctctatacagtgtctttcacagagcaaaaatgcttaattttggtaaatttgacatcaatattttactttcagaaaatgaactagtggtatattatctaaattctaattgctaaatccagggtcatctagattttctcctaattacattctaggaattttatagtgttgcattttaaatttaggtctgtgatccatttgtgttagtttttgtgaggttgtaatgtttgtgattcatgcttttgtatgtggatgtccaattgttttagcatcatttgttgaaaggattctcttggctgcattgtattgcctttagtcttttgtcaaagattcattcagtgtattaatatgggcttacctctgggctctgcattctttccatcaactgatttgtctgttcttttaccagtatcacactgtcttgattactgtagctttatatttaatcttgaagctgagtagtgtctcaatcatccaattttattattcttctacaatatcgtgttggctactctaggtcttttgcctctgcatgtaggtttttgcctctatatgtaaacttcagaatcagtttttcagtagccccaaaagaagttcatggaattttgtttaaggctgtagtgcatcacagatctagctaggaggaactgacatcttaacaatatggagtatttgcattcatgatcatggtatatctttctactctttgctccttctgatttctttcattagataaaagtattttttttttaaggacaagtgcctcactccatcccccaggctggagttcagtgatgccatcttggttcactgcaacctacacttcccaggttcaagtgatccttctccctcagcctcccaagtagctgggactacaggcatgtgccaccatgccaggctaatttttgtatttttagtagagatggtatttcaccatgtttattggtactttcaccatgttatttctccttcttcagcctcctgagtggctgggattacagctgaacctgggaggcggaggttgcaatgaggcgagatcacaccactgcactccagcctgggcaacagagtgagactctatctcaaaaacaaacaaacaaacaaacaaacaaaagtttcaatataggcataaaacatctgttaatttacattatagcacatctacttaagattagttttatttcttataacaaagaatctttgtttcaattttttttataaacaagatcttactttgtcactcaggctggaatgcagtggtgtgattatagctcactgtagcctggaattcctaaactcaggtgatcttcctgccttgggctcctgagtaggtgggagtacagttgtgtcaacatgctctattaatttcctttttttgtagagactaggtctccctatgttgcccagcctaatctcaaactcctggcctcaagtgatactcctatcatggcctcccaaagttctggaattattggcatgagccaccatgccttgcctattttctctaaaagctttttttcacacacacacaaaaaatgtactgtcttttgttggttgcatattagaatataggttatatggagtatcctactttgaagcagcccattccagagtctacgcaaagttgtccttcctgaactactttaagacaattacctcatgtgggacaagggcatgggggcgtcccccagaaaattcaactgaaaataactactgaaacaatacatacctattcccaaacagagcaagagtgtctgttgtagatggtcaacctttgcagacagtagtagcatctatgtttaccaagagacatactgtgaactctgagaacaggttacaatgtttattgagtcaggagaaactcatccatcagaccatagccaaagacaatcaaatattaaacctcttccctgcacatgtgaaaacatcagatgtgcaaaaataaaacattgggagacaaggtcctcactgcatatatgtgggctttagtctccagtgagacacattgagtgcacatcaatttcactactgctgcatctgtcatacactacatttcatatatatttcatactatttttgaattttatattccatttgtctctaaatcagttcataaattaaaactacattatttaacttttcaattccttataacacatgacagaagatgtcacttcatatttctttctttctttttttatttttatttttttgaggcagagtttttgctctttttgtccaggctggagtgcaatggcgtgatcacagctcactgcaacctccacctcccgggttcaagtgattctcctacctctgcctcgcaagtagctgggattacaggcatgcaccaccatgcccagctaatgttttgtatttttagtagaggtgggatttcaccatgttggtcagctggtatccacctccagaccttaggtgatccacccacctcggcttctcaaagtgctggaattacaggtgtgagcctttatactttttacatatatctttattcatttattcttctttgcagtaaaatttctattttcagaacacaataagacggtgtctctgttggattcaactcaatttttaaactgattaaaagatcattgacccaattctgttgaatcttccttttcaaacatgtattgccactaacttttacttgtacagatctgttattcatgtttttcagaaatactttctgctaaatccttactaattttttaaaaatataatgttctaggccaggcacagtggctcacacctataatcccagcactttaggaggccgaggtaggcgaattacgaggtcaggagtttgagacaagcctggccaatatggtgaaaccccatatcaaccaaaaatacaaaaattagctgggtgtggtggcacaaacctgtagtcccagctactcgggaggctgaggcagaattgttgcttgaacctgggaggcagaggtttcaatgagccaagatcgcaccactgcactccagcctgggcaacagagcgagactctatctaaaaaaaaaaaaaaaaaaaaaaaaaaatatatatatatatatatatatgtacaaatatatatataaatttttctgtagaattctggtaatgtctttatttatagctatgaacatgaaacatgacattctattggtttaaattatttaactaatttgttagtggatttccaaatgctaaatctgacttgcatttctagcataaaataccctggatcataatataattatatgttttagtatgctgacacaatggcttccaatatttaaaatttttacattatatttatatgttctatatgactgtaatattctatatgtgtttgtttaagcaaagttctcatatccctcttatgaacacttacacataagtagtgggaagattgcctacattaaaactcttgaacagtctagatagcaacagtttatcaactatttaataagtagaatttctctctcaagtatataatgttggtgtttttctatatgagaataaccctttgagatatgtctctgtttcttctgtaaatattgaacattttacaatctctaactctgtgaggataaatgctgataacatttattcctaaaataaatcaacatttgcatgttagtttacattaaattgcacatatttgccccatttatgtttatatcaatatttaatttcaaggtttttttttgcactgtaacctttcacatattctactcaaggtttttttttttttttttcctttgaggtggagtttcgctcttgttacccaggctggagtgcaatggcgtgatctccgctcactgcaacctccgcctcccgtgttcaagtgattatcctgcctcagcctcccaagtaactgggattacaggcatgcaccgccacacccggctaattttttgtgtttttagtagagacagggtttctccatgttggtcaagatgttctcgaactcccaacctcaggtgatttcgcccgcatatgcctcccaaagtgctgggattacaagcgtgagccaccgcccccggcctcaagcttttcatatgctcacatttcctgattaaatatgaaagaatagtttgggccgggcgcggtggctcaagcctgtaatcccagcactttgggaggccgaggtgggcggatcacgaggtcaggagatcgagaccatcctggctaacacggtgaaaccctgtctctactaaaaatatacaaaattagcctggcgtggtggtgggcgcctgtagtcccagctacttgggagactgaggcaggagaatggcgtgaacccaggaggcggagcttgcagtgagccgagatcacgccactgcactccagcctgggcgacagagtgagactccgtctcaaaaaaaaaaaaaagaatagttttgctcaggaatttgaagattcacagaaaatttgctttttagcagaggaacacctaaaggaagcgcagaacccagaaagacacgctgacttcactgtctgttcttcgtatatcacactcagcattttcctctccctccatgtgagcctctttctttcttcagaaatcatagatgagaaaagcctgttccaaattccttcatttctctggggacaatagacagctgtaatcatttttcttgtttgtttttttctgttttgagaaggagtcccactctgtcacctaggctggagttcagtggcatgattttggatcattgcaacctccacctcccaggtcgaagctattttcctgcctccgcctcccaagtagctgggattacaggcgcgcaccaccacacctgactaatttttgtgttttcagtagagacggtgttttgccatcttggccaggctggtctcaaactcctgacctcaggtgatccgcctgcttcaacttcccaaagtgctgaaattacaggaaggagccaccacacctggcaaagagctgtaattgctgttggtaagttgtaactggagcgaatttttcaaaatattgctattttttttccaagtgcaacagctcatttcactttatttagctatgaataattgcgatctatccatactgacttaaaacacacaagttattatttttttttcacataaaaagtcaggagttaggcatacctggggtggtatggcagcttcaggaagcctttagggatgtctctgctccatcacccctgacatttgttttccattcttcatggtccaagatgagggctgaagatccagaacatctattaacatccatattttagaaaagcaagaaagctgtttttaaaatcatcgttgtttcatctacttaatttctgaatcttattttatttgtgcttttttcttccaacttctattttaggttcaagggtgcatgtgcaggtttgtgaaatgggtaaattgcatgtctctggggtttggtgtacacattatttcaccagccagatagtgaacatggtacttgataagttgtttgtttgtttgtttgtttgtttgtttgttttagagggagttttgctcttgctgcccaggcttgggtgcagttgcgtgatcttggctcattacaacctccgcctccaggttcaagtgattctcctgccatagcctcctgagtagctgggattacaggtgcatgccaccatgcctggctaatttttgtatttttaatagaaaccaggtttcaccatattgaccaggatagtcttgccctcctgaccttatgatccgtccaccccagcctcccaaagtgctgggattacaggagtgagccaccgtgcctggcccaatttttgtatttttagtagagacaagggtttagcatggtggcaaggctggtcttgaactcctgacctcaggtgatccacccgcctcagcttcccaaagtgctgggattacaggtgtgagctgccgtgcctggcagataggtagattttttatcctcaccctcctcacaccctctactctcaagtagaccctggtgtttattgttttcctctttgaattcatgtgtactcaatgtttagcttcaatttataagtgagaacatgcagtattttgttttctgttcctgcattaatttgcttataataatggcctccagctgtatccatgttgctgcaaagcacgtaattttattctgttttatggctgactcgtattccatggtgtacatgtgcctcatttttctcattcagtccactgttgatgggcacctagattgattacgtatctttgctattgtcaaaagtgctacaatgaacatatgtgtgcatgtgtctttatagtagaatgatttatatccctttggtatatatctggtaatagtgtagcaggatgagtcgcagacaaaactcctcagacgccagattaaagaaggaagaggttttttattcggccgggatcattggcagactcgtgtcttaagagccgagctccccgaaaaagaaattcttagcccttttaagggcttacaactctaaggggtctacatgaaaaagtcataatagatcaagtaagcgtgagaaacatgactgggggctacatacatcagctaacagaacaaaaagttttacagtattttctcatacagtgtctggaatttacagataacaccaatagttttggtcaggggttaataatattattattattttagccaccagggccaggtggtggtgccaaggtcgtctagctatttatcttacttctgtttcttttcaactttttgctttctcccttttctcctgtcttataaactagggaaaaggggaggttggggagaaactgagaaggacaacaggagaagtggcgacctcataccatatttccccccctttgagaattttcacttttagtgggagttcttactctcgtcctcacttttttagtctctttgtgagatagagcgatagtgatttgtataatacacatgtgctgaagttttctgatgaactaaagtaacaacaaaatattttatcatttgaaaaagcaagggtaatacacaggggagcagcaagcaagttcctatcactagcaatacacctacaatgagggttttaaatcctcctatagctggaaaccattttccaaataaagactcaggattaaacttgtgccaaacctgtacaggcacatgtgccacctttgtcatgtccctgactatgttttcaaccacctgtccttgatcatctatttgtaggcagtaattggttaagttaaattttccacaaactcctccttcagctgctagcaagtagtccaaggccagtctattctgatagatagcattcctcgtttgggtttcctgccgagctaaaacagtcaaagctctgccagtttcattagtaattatttctaagatggcctgcaaccgtatgatccgattgagcatgtaaatgggggttcggtatccccatgagccgtcttgtgcccatgtggcaggcccataatactgtatgatcctttcagggcgccactcattatctttccagtttcctataactatgcctctcttttctcgggaggcatagacagggaaacctagggtctcacctgtttttatgggtaataagaaaaaggacgacttaatagtgccaataacacaactgcctgcctatttattaggtaaccgaatgtaggctctgtgcccacatatccagtatagtccagcgggagccatccagtcctgatgagattctggatgagcccaagcagtttttaattttgaaaatttactaaatggattcttttcagtgtggtttatgccccaccaagtaattgtctttgttgtactgttatacaacttctgtcctatacaattaagctttcctacagggatgataaagtctttcccttctctagctatacagtattgtccaataattgaggtttttaggacccagaagttgctagcttgggttttctgaactggaattatatcaggagctggatcagtaggcaccaactctcgggcttcccaaggccatcggtctccgatagtggttcccccgcatacataacaagaagtaacattaagggaatgagctacattttctgctaattggagaaacaaattttttgtcttttttggaaattctggtgctggcagattcagctccttataaaaggtttgaaatactggtttgggagagcacttgtggacctcccctctaattaaaatggcaacttgggggtttaaccctgtcccatcaatccccagggttacacgttctccctttttccaatggggatctaggggattggtaattattagttctagtgggttacagtgaccagcagcacaggaggggttggcttcccccttctgaagataaaccgggtcctttttgttctttttccaagtagcccaaataacacatggccaataggcacaattttcacaaacccctgactcatgacaaacatatttattttttattctgtagctcctttcccagttaagagaatcacatcctattcctagctttttactattaatggctgcacaagcatcaaatcttaaagttatttgtttggggatttctttttcttctgttctagttattattttacttgtatcacctaggaaaaggccagttcttattcttatttcaaaaatggtggttgcaggaggctcagatgggttataacacacatcaggtcggtcatttcctgggctacatacattgtactgagtagcattatacaaacaagtttcttttaatgttcctatacatttataataactatagaacagaaacattgttttaatttgctgtcctacctcggtgacctgatgaatacactgggaacagtccccagtttgagtaagatcagttgaagcccttactgtataagtccaaaatttaagaaaaatgaatcccatgatgagcttctgcatgcttcggccgtgcgtggaccagtcagcttccgggtgtgactggagcagggcttgttgtcttcttcggggtcactctgcaggggttttctgggcttggtcttgcctcccaggtttcaggcactgcaggttttacacggctgtggtggatccaggttgggattccctctaccttcacagcggtgggagtgctcaggatgacagtctggggtcctttccaccgtggacacaaacaggctacgtttcagtccttgatccacactagatcacctggggagaaagggtgaactggggagaataagttaacagggcatctctcatttacccaggccgagattgtttgtgtaatttttcctgaagcctgtagctatcgctgtaactcaatttcacctaactctcggggagtgcctggaagtccccgcaatataggagggggcctatgatataatatttcataaggggaatatcctgttcttttagaaggggtacatctaattttaaataataccataggaagagcctgtatccattttaatcctgtttcttgacatactttccctaaactatttttgatagtccgattcatccgctctacctttccggaactctgaggctggtaggcagcatgcagtttccatgtgatccccaatacctttgccgtcttctgtaccaagtcagccacaaacaccagcccattatctgagccaatccgtaagggcagtccaaatctaggaataagatctcgaagaagcacacgagttacttcatgagctttctcagttcgtgttggataagcctccacctgcccagagtaggtacacacaagaactagtaaatacttgttacctccacactttggcatctctgtgaagtccacctggagatcttcaaagggggctgctccataagcttgtatgccagggggaacagctggaccttgtctcgcattatgctgtcggcaggtaacacaccgctgcgtcactgttttggcaagggctgacaaatgcgagatgtagaaataccagcctaacaacttttcaagtgattcctgacctagatgggtggttttatgcacagccagtacaactgcagctcctagcagctgtggcacagctactctcccatctggtaaccaaatccatccttcctccatcacttgtcctccctctgcctggagaaagtccttttcttctttagaataagtaggtacaagatcaggtgcttgagggagcaggggggctgtcactgatgcccggaagggggcagatgctgctttttgagcctctaagtcagtgcaggaattccccaaacccaccaaggtggaagctcactggtgtcctccgcaatgtataacagccaccttgtggggtttccatactgcttctaataattgcaagatttcttgttgatattttatgtcttttcccccagagttcaataggcccttttctttacataatgctccatgcacttgaagggttaaaaagacatatcaagagtcagtgtaaatgtttacagtcttaccttcactgagttctaaggcccgaattaaagcaatgagttcagctttctgagttgaagtgccctggggaaacgatctggcttcagcaacagtgtccagagttaccaccgcataccctgcacatctctcttcttgtgggttgacaaagctgctcccatccacgtatagttcccagtctactgatgcccagagtaaactgagtccaacacttctacacagtcatgctcgacagggatctctaatactgggagcaaggtagcggggttcagggtgttacaaacttcaatggttatatggggattttcacaaagcaaactttggtacttagtaagtctagcattcgttagccaatgatgtcctctagtattcattaaagtcaccacagcatgggggtcctttatgttcaggttttgcccaagaatcagcttatctgcttcttgtactagcagggcagttgctgccaaggccctcaaacacgggggccatcctttagaaaccccgtctagttgtttagagaggtaggccaccggcctcagccagggccccacagtttgggttaaaactccaactgccatcttttcactctctgacacatacaatgtaaaaggctttgtcagatcaggtagccccagggctgggactgacataagtctttcctttaactcatgaaaggcttgctgttgctgggatccccattcaaaaggttcctggtcccccgcctttgtgacctcatacaaaggcttagctaatactgcaaagtttgggatccacagtctgcaaaaacccacagcccctaagaattctctcacctgccttctggtcttaggctccggtagattacaaatgacctgctttctttctgatcccaggctgtgctccccctgttggatagtaaatcccaagtaacatacctgctgtcggcagatctgagctttttttcttggacaccttatacccacagtcctccaggtgccggagtagagcatctgttcccttggcgcacccgactgccgtggggtgtcccagcaaaaggtcatcaacgtactggagcaacacgcagcctaggtctctggtgggaaacttctggaggtctcgagccaacgcctccccaaagatggtgggggagttcttgaacctttggggaagctgggtccaagtgtattgagtagtgacacctgactctggatcttcccactgaaaggcaaacagcttctgtctctcaggggctaatctgatgctaaagaaagcatctttcaggtccaagcaggtgaaccagctgtcctcagctggcagcaaccccagcaatgtgtacaggttaggtactgttggatgtaaagtcactgtagcctgattaaccaagcgcaaatcctgtaccggcctgtagtccttggtcccaggcttgggaacaggcaggaggggagtgttccatggagactgacaaggaactataattctaaaggttcttaggcacttgagatggacctggataccttcaagagcttctctgaggaccgggtactgtttttgcctaaccggctggaccccaggcttaacttctataagcacgggggcttggttgactgccaaccctggagggttgtcttccgcccacactcttggccaccgcttagccagagctggtcttatctcttggcccggctcagttaagaaaagtctccattcctcctctcgggggagcataagggtcataatgactcctgttccgggtaactttagcagcaaagagccgtgctctgtaaaagagatagtggctctcagtttgctaagcaagtctcttcccaacaagggcaagggacaatcaggcatgtacaaaaactgatgaatcactttatgtcctcctatagtacaagtctggggcaagcagaaagcttgttttgctgaaactcccatggctccgatgatgtcaatagtctttttggataagggggcgactgaggcagttactaccgaatgttcagcactggtatctacaagaaaatcaatgtctttacccccaactgtcatcctgaccataggctctttggaggtccttgagcccagtccccctcagtccaataacccttctgccaggttgagcagggccccttcctccttgtctggagcctcctgctccgagtcaccttgttttccttttagctgagggcatttgttcttccaatatcctatttctttacgataagcacactgattacactgcaagctctgacagccaggctgagtttctttcccagggccccccttttcccttgcctctttggggggacccctctaattgctgcagctaacaggtcggcgtttcgccgggcctgacgttcattctctatgtggttttccttacggcttgctgcatccctgtttacaaacacctggttggctatttctaataactgtgatgtgttcatccctgcaaacccagcctttttctgcagttttcttctaatgtcttctgtgctttgactaactaaagccatgttaatcatgcgttgattttcagggctatcgggatcaaagggagtatacatacaataagcctcacacagtctctcgtagaattttgctggactttcttcttttccctgaatgacctcagagaccttgttaatgtttgtggccttctgggctctcctctttaatccttctaagagagctttcctgtatcggtttagcctttgcatatcctctctttaatttgggtcccactgggggtcggttcctggtaactgtgtccttacatactcttgggggttttggtaatcagccagtgcatgttcctctagccacttagttgctgcttgaagcacccttcacctttcatctgttttaaagaggaacatgagcaactggtggcaatcagcccaagtggggttatgggtctggataatagtttggagcaaatcaattagagcttgcggcttttcagtataggacggggtattgtttttccagttgagaaggtcggcagaggtgaagggctggtacacaaaaacacgactctccaccatgtgcccatcctcatctattccagtatactgctgctctctcaggggcatttgtatccctgttttgggtcttaaatgagctgccaagggaggggtttctcccgaggcttcacctcctctcttgtctactctgagtggcctagggatacatttgtctggcagaggcgcaagcactgtggactcaaaagtggggagcctctctccctgataaggggagggcaacactgggatcactggtgccatctcctgcaatggatcttctgatgtttggtcgaacagaacttcaggagttgatttccctcagcgggtggagcagaatccttccttgactatctgtccctttgctactagcactgctgctgcctgccctcttagccactgtggggggtctagcaccagctgtaaccaagtgtctatgtatggaaactggtctgagtgtcctgacttactagttaccttgtgccataccttagaaacaagggacctgtccaggcttccttctgatggccaacccacttctaatgttggccaatctatttcacacaaagttctaagtttccctggtgtcatagtaaccccatagtctccattaaatcccttcttaaaatttttcaacatagttcctagaggagtaggcttattttgtgtctgatccatgtttcctcaagacaaaacaccaagctcacaccacatgcacaccacaaaacaaagaatgggtaaaaagtgcacacacacactttttcagttttcaccaaaccagaatcaaaaccaaaatcagagtatccagaaatccaagccaggtcaaaccaaaaccaaagtatcaagcaattcaagtcaagtcaaaaacaaaaaccaaagtgccagtacaggcatgccgtggttgatcaggccacgcttccactcaaatggagtgggcaagttccgaagaccagtcttaccaagtttcaaatgtctggactccaagtgcctgttccttcccagtgttcagccactgcattgatcctccacaggggcctgccacgcactgctctgacgaggctttccaccggggtaattgcctacctgggagcgctctcaggatccgcgtcactcaagctggccagagtcccctgcagggatgctccacagggcaggcctaagccacctaaggggctgcctcgactgtccttcaattaccttgcttcctggccagggaaccaagaaatgtagcaggacgagtcacagacaaaactcctcagacaccagattaaagaaggaagaggttttttatttggccgggagcattggcagactcgtatcttaagagccgagctccccaaaaaagaaattcctagcccttttaagggcttacaactctaaggggtctacatgaaaaagtcataataggtcaagtaagcgtgagaaacatgactgggggctacctacatcagctaacagaataaaaagttttacagtactttctcatacaatatctggaatttacagataacaccaacagttttggtcaggggttaataatattatattttagccaccagggccaggtggtggtgccaaggtcatctagctatttatcttacttctgtttcttttcaactttttgctttctcccttttctcctgtcttataaactggggaaaaggggaggttggggaggaactgagaaggacaacaggagaagtggtgacctcataccatatttcgatggctgtgtcaaacagtttaaagttatttgagaaatcttcacactgctctttccacagtggctgaactaacttacactccctttgctctgcatcctcaccaatacaatactgtggtttttatttgcatttctctaataattagcaacgtttacatttttttaatgtgctcttttgctgtgtgtatgtcttcttttgagaagtgtctggtttttgtttttgttttgagatggagtcttgttctgtcacccaaactagcgtgcagtggcaggatctcagcttactgcaacctctacctcctgggcttaagcaattctcctgcctcagtctcccaagtagctggattacaggcgcccaccactgtgcctggctaatttttgtatttttagtagagatggagtttcaccatgttggccaggctggtctcaaactcctgacctcatgatccacctacctcggcctcccaaagtgctaggattacaggcatgagccactgtgcctggctgagaagtgtctatgtctttgctcattctttgattggattgtttatattttgcttgttgatttatttatgattctttatagattctggatattagatctttttcagatgcatagtttgcaaatattttctctcattctgcaggttgtctgtttactttattgatagtttctttcactgtgtagaagctcttaagtttaattaggtcctgcttgtcagtttctgtatttgttgcaattgctttgggagtcatcatcatgaaatctttgtcaagacctatgtgcggaatggtatttcctaggttttcttcaagggattttacagttttagattttatatttaagtctccaatcaatgttaggttgattttgtacatggcgagagagagaggtccagtttcaaacttctgcatatggctagtccattatctcagcaccatttattgaataagaagttctttccccattgattgttattgtcaactttgtcaaagatcagatagttataaatgggtggttttatatctgggttctctaacctggtccattggtctctgtgtctgatttcttacccgtaccacgttatttagattattgcagcctgtaatgtagtttgaagttgggaagtgtgatgcctccaggtttgttctttctgcttaagattatttcagctatttagactctgttgattttatgtaaattttagaatgaattctggggataatattatttgtagtttgataggaatagccttgaatctgtacattattttggacagtatagcctttttaacaatattgattctttttattcatgagcatggaatgttttccattactttgtgctttctctgatttctttcagcattgttttgtgattctaattgcagagatctttcatccccctgacataattttatttgatattttgcattcacaaatactaattttctctatataattatgataattcagtttctctatgcaatattttacaaattttacattctactcatgtttcccttttcttttctctttttttctttgagatggagtctagccctggtgccaggctagagtgccattctcctgcctcagcctcctgagtagctgggactacaggcatgcaccaccatgcccagctaatttttgtatttttagtagagacggggtttcaccatgttggccaaaattgtctcaatctcttgaccccgtgatctgcctacctcagcctcccaaagtgctgggattacaggccatggtgcctggcctcaagcctcttttcttaataggcattccattatgtgctccttcttggttaagttgaaaaaggcttctgttttaattccaagaggaaaccatttttgcatttgataaattccacttattttaagatgatgctaaatcagaacgtttatattctccttgaatctttgaatcattatagataatatttgccaataaattatgcaatcctatttaaattttaaattttcatattgcaatattaaataaatacgtacaaacattctttaaacaactaacaagagatacaaaaatgtttttaaaatatgtggattttttaaaaaatatatctgatgttgagacagcatgatagttaaaagcatcttcaactcctgaaactgcctcctacaaggaggtgattttagaaatgtcatttatcctattttcatctaagccctcttcataggtaaaatcagaataataaaccacttcatagagttgttgtaaaaattgtatgtaacacattaatataacacattaatatagtagttttataatgctatatctataaggttatcacactatatatagttataataataaagaaaagccaatggcattttcatattaaaggtttttccaagaaaagccagtgagatctttcatattaaagttttatatttgattcaagtgtatttcaatgaaataatataggtgaaaattaaattactaaaatagaaaatgcctgacaacatgtgagctagatatcaaccactggaatttattttgaaaagcacaagcctaatgcaaataatttataaatatatatatgtgtgtttatgtgtgtgtgtgtgtatatatacacatatatatatagagagagaatagaaaaaatcttagtgaaagaaaagtggaatttaaaaacaaagttttaagttggaaacaatggtatgtgaacaatagcccatttcagttgccacaataaaacagaccttatgtgtcaatgcaggatattctcactctgaatgaaaatattagtaattggaaaataatgaaaggcctccaggaatttggaaataggaatgatcttcttttctcagacaacagttggattattgaggaattttttttttgccactttgttataccgggtggatattaaagtccacagatttgattctcaagcacctggctatagccaacatcttggtcatattctccaaagcagcttcacagacaatgacttcttttaatttcaagcatttcctcagtgatattgcatgcaaacatgttttctatgttcacagagtgggcagaggtgtgtgctttgccaccacctccctcttgagtatcttccagccatcattgtcagccccatgaactccaggtgggcacagttgaaactacaaacccccaaatatattgggtcccccaacatcttgtcctggattggaaatacactgataaataccattttttctatgcatgtgattggcaaatcgaacagcaaaaacaattcaaagaaaaaagatttaagatactgttcttcattagataataacagaattaccagcttactgtgcacaacattatcatattgcatggtgtttgtgtgttagatacagttaggttcactcttcaaatagcttatccagtttccccattctctattctataattccaagtattccttacctcaactgtgcaccaacttacctaactatgcctagacatgaatgaaattgttgcaacccaagtcccagtctgcattattttcctttttagagaataggttgctttcctagttcccacataatggaccccattctctctctcttaactcccttatgtgactaacttatctaaaaaatttgaagtatttagccagttgggactagttgagactgtgcggtccaaccctaaccgatagaggaaagacacagaagtagaagctgcattagagataatagaaactcgcacttcctttgttttgtgtgcccttgccattgcttaatttacgaggtgcacccttttatagaagtaaatttgccttgctgagtgctatttcttgtggagcaccgaaaatctgtttgtaacatgtgtttgagactcataatctggaccagtggctccaagatttttattctgtacaagtggccaatgagcacatgaaaagatgcacaacatctttattcactagaaagatgtaagtcaaaaccacagtgatatatcacttcatacctatgggtacaggtatatttcagaagacagatcagtgtgggtgaagatgtggaaaaattgaaaccctcatagagtgcaaaattaggcagcagttttggaaaacactttggcagttcttcctgaggttaacatagagttactacatgtcttagcaattccacttctgagtatatactcaactgaaatcaaaataggtccacacaaaaacatgtatatgcgtgtccatagaaacattatttgttatggccaaaaggtgagagcagtgcaaatagtccatggaggactagatagacaaatgtgatgtagtatacaaggcaatagtattccgccagaaaaaggaatgatgtgccaatatgggacacaacatggatacatattaaagacattatgcttgatggaaaaagctatccaaaaagggtcatgtactttatgaatccatttgtataaaattcccaaaataggcaaatcctttgaaacagaaagtggattaatggttgccagaggctgctagggaaaatagaaagtggctgaatgatgggtgtggagatttttttttgttaattatacagttctaaaattacacagtggtaatgattgtaaagcattgcaaatacacaaaaagatactgaagtgtaaacctgaaaataattaatatattgaatttgatgttatgtgaattttatctcgataaacataattttataaacaaacttcaagccactgttgccaatgataaagactagataatatgctctaaatgcagcagaaaaacactgaaacactaagttagctgaaaggaaaattgaaactaaaatgaaaacagagtccacaaagttctactgaagctttagtcacctagatattcaaataaaaacacccaggttcaactgtgtaaccctctgtcatagaagtctgggtgcttttggtagataaatccattgggcatatcagtgtgacataaaaagtgcttaaaacgtagtttttttaaaaaattataaattcgtgacactcataaagataggaacacatattaaaatatttatttaacatctgaggaatcagccgatatgataaccagtgcaaaaaagagtcaaatggccaggctcacacctgtaatcacaaaactttcagaggcccaagtgggcagatcacgagatcaggagttcaagaccaccctgaccaatatggtgaaacctggtctctactaaaattacaaaaattagctgagcatggtggctgtaatcccagctactcaggagactgagcctgtaatcccagctactcacgcctgtaatcccagctactcaggagactgagccaggagaatctcttgaagtcaggatgcagaggttggactgagctgaactcatgccacgtcactccagcctgggcgacagagtgacactctgtctaaaaacaaaacaaacaaacaaagcaaaaaaatagccaggcacggtggctcatgcctgtaatgtcagcactttgtgaggccgaggccggtggattacctgaggttcagagttcaagaccagcctacccagctacttaggcggctgaggcaggagaatcatttggacctgggaggcggatgttgtggtgagccgagatcgtgcaattgcactccagcctgggcaacaagagcaaaactcggtctcaaaaaaaaaaaaaaaaaaaaaaaagaggccaggagcggtggctcatgcctctaatccaaacacttgggaggctgaggcgggcagatcaccaggtcaggatatcaagaccagcctggccaacatggtgaaaccccatctatactgaaaatacaaaaacattagctgggcgtggctgcgcacgcctgtagtcccagctgctcgagaggcttaggcgggagaattggtagaacctggcaggtggagcgtgcagtgagccaagatagcgccactgcactccagcctgggtgacagagagagacttcttctcaaaaaaaaaaaaaaagaaaaaaaatgcagattcaccttcttagcaagagcagagctgcagttctccatgatatgtttggacacctcttgtgggagatctgctgtgcccagtgcctggactcttccatgcttatgtttcttgctgccactcttgagtacctgatgccccatatcctggagctggtgaccaatgaagctcataatagccacagaaggtacagttatattatcatctatattacatatgattatctatgtgtgtattatatatatacatatattctatatattatataaaatgtatatatatgttttggacaaagacatattcaaacaatagttaatagtttttaaatattcagaatcaaaattatttataaatatattttattacaaacacaattattcatcttattcttagccaaaacacctgatctgtctaataagcacatatttcacagagctacatagagttatcaatggctaaatacattttatagggaaaagtatactctatagaaattctgccttaattgaagaactcaaagccccaaatgttataaacacttttatggctgcattaagttaaaaataagtgttccatcaagtgttgggtcaatctaactcctttctcctgagtatcaacatttgaagttttcacctattcaccaaagactcaaaggccaccctctggtatctctggccttttcatagacagatggtaagaagctgcccagctcatttcaagttcaaggtcagatggtttcttctagaagttccagtttactgtgtaccagccatgtgattctgtatattcatttattctctctaagcagccgtctccatctgtgtaaaatcaggatgatgaatttctctatctttgggttatcccaaataagaagtcaatttgagcttaagtttaagcttaatgcaatgcttggcaccacaaggcatgacacaggatgctaaactgggcacctgtattttacaaaactagaaaactttgagtttcttccctctcctgcattttcacatgtatttggtttaatctctaaatctgttgaagttgaatagatgtgtagacagggattgagattaataatctcatttacaaaaacataaaaaagaatgaaatacgtagaaataaatttattgaaagaggtaaaagatctatacactaaaaactctaaaacattaaataaattgaaggaactaaaaaattgaaagatacaccatgcttatgaattgaaagaattaatattgtaaaaatgtccatactacccaaagtgatctacagattaaatgcaatccttataaaaattccaattatatttttctcagaatttaaaaagtaattatcaaatctctatcaattcatgaaagacccagaatagcctaagcaatattgaggaaaaacaacaaagctggaggcatcatactacctggtttctgaatatattacaaagctacagtaaggccaggtgcagtggctcacacctgtgatcccagcactttgggaggccaaggtgggttgcttgagtccaggagttctagaccagccttggcaccatagcaaaacaccatctctacaaaaaatagaaaaattagcagagtttaatggcacaaacccatagtctcagctacttgagatgcggaggtgagaggattcctagatcctgtgaagttgaggctgcagtgagccacgatgaagcaactgcactccaccctgggcaacagactgaaacctgtctcaaaaaaaagctacagtaagcaaatagcatggtactggataaaaataaacacacacaaatgaagcataataccaagtcaagaaataaatgtatctacttcatttctggtaatgaaggaacaatgttttcaccagcaggcttcacctttcagtgttctatcaatgaatatttatcggtagattatttttaatctaacttcaagcattctgtagcaggccagatgagggcagatcagatgaatgttaacatgaaaattttgtggatttatagttaatgagtaatcatttatgaaagacttaccctatatttctgcagttgaattatttgcagttggtctagtggtgagcacagtcaataagaaacagataaataaataaataaatgtataataagaaactaaatcagtagcctgaagaaaaagtagagttctatttgaaacaataaagaaagagagagaatgcttactgatcttttttttaaaatctgtgatggtcaatcaatatttctctctcagaaggcaaaaaaaaaaaaaaaaggtagccaggagacaggattaatttgtatctcctgcttggatggacagaacagcatgtggagactctcatcatgaacttttactccaagaactaccataggaacataccaggaaaaccaaaagaatgcacagactctttgaaagaagtggcttgccactgcaacctctgcgagacaactgaaaaacagcaagtgccaaaagtgtaagagaaggaacattcacctctaaacacacatactcaaaacctgaaaatccagattaccagagaaggatttagccttacctagggccgaaatgaatttagagagccaagcaaaatataaaagcagaagcagtgggaagagccccataggcactcttgatcctcagggaagccatttctgactttatctcacaggggtccttgggaagggctgccagtggaattggggaagggctacagggagaagaaaacttccagctaaaccctgtaagaattttgacctagtgtcaatgttccttggcagaatcgatgaggggacagtgaatgagaagcacagatacgggcacaaaagccatggcaggtggtgaggggtggcgcctgaaagcccaggttgctttctcaatggggaggcttatagcctggggcaagatctcagtactgctcacggactggatataaacttggtgctgtttgtggggtagggtgtgaatgaaactggccttgctggcttcatgggagctgagtgaggcctgtcactgctggctttccttcacttccatcctgacctgtatgatacagcagaggcagccataatccccctgggaacataactccattggcctgagatccatactcccaaccccacagcagctgcagcaagccccacccaaggagggtctgagctcagacaggtctaaccttgtcctcgcctgatgcccttactctacccatgctggtagctgaagacaaaaaacatactctcttgggagctctatgttcccacccattgcctgagaaacctgaatacttatccaggtgacccaatggcaagcttgcctacaccctatactaccacaactgatgccgtattgaaaatcccacctctaggttggaggccaaccaactcaagccattacatcaactcatcaaagaaccccaaccaggtggtgtggctcacacctgtaatcccagcattttgggaggctgagatgggtggatcacctgaggtcaggagttccagacccccctgaccaacatagagaaaccacatccagtttctactaaaaatacaaaattagacaggcttggtggtgcatgcctgtaatcccagctacctgggaggctgaggcaggagaatcccttgaacctgggaggcagagattgcggggagccaagatcgcatgattgcactccagcctgggcaacaagagcataactccatctcaaaaaaaaaaaaaaaaaaaaagaacaacctcactccaataaaggagaaaacaacagctaattccatcacctgtaacatcctggctaaccagaagtcctcagtctttcatgtgacaacttcactgctagaacaaccagcatccaaaaaaagaaaaaaaaaaaccagtgcactaaacagaactacaaccaaccaccctcacagagtccactttactcccctgctacctctaccagagcaggtggtagaatccatggctgagaaacctgaagacagatcacatcacaggactctttgcagacactccccagtaccagcccagagcccagtagctccactgggtggttaaacccagaagatcaataacaattcctggctctcaggaagccccatcccaagggaaaaggggagactatcatgtcaagggatcaccccatgaaacaaaataatctgaacagcagcctagagcctcagctctttcctctgacatagaaaacccaaatgagaaggaaccaaaaaaacaattttggtaacataacaaaggaaaaattttttaacaccttggaaagaccacactagctccctagcaatggatgcaaaccaagaagaaatctctgaattgcagaaaaaagaattcataaggtccattattaagccacttaaagaggcactggagaaagataaatactaactgaaagaattttttttttaaaatacaggatatgggtgaaaaaaattaccagagaaatagatagcataaataaaaaaaaatcacaacttctggaaatgaaaggcacacttagagaaatgcaaaacatagtagaaaattacaaaaatagatccaaacaagtaaaagaaagaacttcagagctcaaagacaaggcttttgaattaacccaatctaatgaagacaaaaaagaatttaaaaaatgaaccaaacctccaagaagcttggaattatgtaaaaaaccaaacctaagaataattggtgtccccagggaagaagtgaaatctaaaagtttggaaaacttatttgaggaaataactgagaaaaactttcctggccttactagagatctagacatccaaatacaagaagttcaaagaactccaaggaaattcatcacaagaagatcatcacctaggcacacagtcatcaggttatctgaagtcaatatacaggaaagatttttaagagctgtgagaaaaaagcatcaggtaacctataaagaaaaacatatcagattaccagcagatttctcaacagaatccctacaagctagaagggattggggtcctatgtttagcctccttaaacaagacaagcatcagcccaaattttgtattcagtgaaaataagcttcataaatgaagaaagatacggtcttttccagacaaacaaatgcttagagaattcaccactaccaagccaccactgtaagaactgctaaaaagtgttctaaatcttgaaacaaaacctcaaaatacactgaaatagaacctccttaaggcataaatctcacaaggcctataaaacaataacacaatataagaggtattcaggaaactactggcacaatgaatagaacagtccttcacacctcaatactaatgttgaatgtaaatggcctaaatgctccacttaaaacatacacaatagcagaatagataagagtttaccaataaaatatctgctgtcttccagagactcacccaacacataaggactaacataaacttaaggtaaaggattggaaaaagatattccatgtaaacgtaccctgataccctgaaagcaagcagtagtagccattcttacatcagacaaacaagctttaaagcaaaaacaggtaaaaaataaaaaacacaaagagggacattatataatgataaaaaaggactagtccaataggaaaatatcataatcctaaatatatatgcacctaacattggagctcccaaattcatgaaacaattactactagatctaagaaaagggataaatggcaacacaataataatggggaacttcaatactctactgacagcactagacaagtcatcaagacaaagtcaacaataacaacaaaaaagggaatggacttaaactataacctagaacaaatggacttgacaaatatttacagaacattccacacaacaactgcagaatatacattttattcatcagcacatggaacattctccaagatagacacatgataggtcacaaaacaagtcgcaataaatttaagacaatcaaaattatatcaactactctctcagactgcagtggaataaaattcaaaatcaactctaaatgaaccatcaaaacaatgcaaatacatggaaattaaataaattgtagaaattaaataaatacatggaaattaaataaataattaaatttaagatcaacctggttctgaatgatctttggatgaaatcaagatttaaatttaaaaattctttgaactgaacaataataatggcacaacctatcaaaacgtctgggatacagcagaagtggtgctgaaaggaaagttcatagcatcaagttcttccatcaaaaagtctgaaagagcataggttgacaatgtaagataacacctcaaggaactagaggcacaagaacaagccaagcccaaacccagcagtagaaaagaaatatcaaagatcagagcagaactaaatgaaactgaaacaacaacaacaacgaaaatccaaatgataaatgaaatgaaaagctggctcttagaaaagataaacaaaattgatagaccattaacagcattaaccaagaagagagaagatccaaataagctcaattagaaatgaaacagaagatattgcaaccgctgccacagaaatacaaaagatcatttagggatactgtgaacacctttatgtgcacaaattagaaaatgtaaaggagatgaataaattcctgcaaatgtacaatcctcctagattaaaaaaaaaacaactctgaacagactaataacaagaagcaagattgaaataataatttaaaaaattgccaaccaaaaaaaaaatgttcagaaccaggtggattcacagctgaattctactagcctttcaaagaaaaattggtgggggtaagggaggagaccacccctcatattgtcttatgcccaatttctgcctccaaagaaagaaaaagtaaaaactaaaaggcagaaatgaaatccacaagcagacagcccagcgccacaccctgggcctggtagttaaagatcgacccctgacctaattggttatgttatccatacattacagacattgtatagaaaagcactgtgaaaatccctatcctgttatgttccattctaattaccagtgtatgcagcccccagtcatgtaccccctgcttgctcaatcgatcatgaccctctcacgcagacccccttagagttgtgagcccttaaaagggactagaattgctcactcggggagctcagctcttgagacaggagtcttaccgatgtccccagccgaataaaccccttccttctttaatttggtgtctgaggagttttgtctgtggctcatcctgctacaggggcagggccaagatggctgattagaagcggcatcccatagaaaagaaccataacagtgtgtgaatgctgtaccataacctgaggtatccatgttctttcatcagaactgactaggtggctggcgtgatccatggagaggaaggaagagcagtgtggtgtggcagcccacctgacacccacatgggcctggggagcccccaccccacagccaagggatgcagtgagtgagcatgctacccagcctgggaaactgctttttccatggaactatgcaacccacggattagaagattccactcatgaacccacaccactggaacctaaggtcccaactgttggaagcaagagctcagagtcgcaaagaacatgggcactgaaacaaggaatttctcagcaaggcaaggcacatttacttctgcagaagggtgccagtcatgtctctggctgttttgagagcacagcatacaagagagggaaggagtttttatccctaacacagtccctacttctgtgtgctgcccccattggctggagtcagaccacacaatctaagctaactcgatggctattttaaatcgagactggcaggaaggttgtttacagagcaggtaactaggagtgaggaggacttcttccaaataaggaagagatgtgggttacggattgcgactggggagaagagatgtttacagagcaggtagctaggagcgggaaggtataaggaagttgattttgagaacaaacaacaaggaagttaccctttgaagaggaacttattatgcctgacacaaccctggagctgagcagattatgaacagcctgtcaggtagaatctgcttaagcctgccgagttcccacggtgggggagaccagcaccaccgttgcagttggctgctgtctaagctgtttgagctccttgagggagggacagcagccagcactgggactcgaaactgcctaacaggctaagatccctggatggggaaagggaagcagccatctctatagctcctggcctcacttttcctctgctagatccaggaaaactggacagcttggtctcaagaggtgtcccccacagcccaacacatgggctgtggcagactgtggccagaatgtctcttcaggcctgacgctgacccatctctcctcactggtcagggcctccctgcaggaactccaacatctccagccaggggctcagggacataactctgatctccctgggcctgagcccctagggggaggggtggctgcagtctctgtggaccagcagacttagcctttcctcctgctagttctgaggaatttgagcagcccagatgagtgggtttccccccagcaaaacacccccctccaccaaggaacagtcaaagtgcttcattaaatgggttctgctccccatgccacccaactggtgacacttcaacaggggttgtcagacaccctatacaggagccatcttaatggcatcaggttggtgcctcttgagatcagagatcacagaggaaggagcagactctgcttttctccaacctccttgagtgacatctccaggcatgggagtgaaccagattaatagggcctgaagtgaacccccctcaaactgcagaagccctacagaagatgtacctgaccattgaaagaaaaacaaacaaacagaaaggaacaacagcatcaacaacaaaaaagtacccacaaaaacctcatccaaggccaggcatggtggctcacacctgtaaaaaggttaacgtgtttttgtgattggctattgtttttcagtaactaacgtataggaatagattgaaacagaaatttctctgaaacagcgccggatgaatgcctaaaggggctcacacaacctgctctgagacttggtgaccattatttttgtccacgttcaattgagttcaaatttaatatttaacttttccagtacattcggcctcaattggatattcaattgtattaaaatacccttacggatacatcgggaaggcatagttgatatatattacagatacagggtaagcacaggagaattaaaggcacaattaataaaaattaaaccccacatggcgttgcaagcagagtaatattgtgagacttgccaggaatatacacacaacatttagtatgcagtaaggcgcaaacccctccttgggctgtggtaagcatatctaatgccatttgattttgcaacacaacaatacgcagctgagcaaattcatctgataacaacataagcccagtgctactatcattaagagctttttctacatgtaagctaaatattataatttgttggtgaagcaagattgtaccagtggcaggggagaatactgtgatagggtaccaccaccagggagtccagcacatttgtaaccagcgatgtttgtaagcatctagattactggggaggggaatattatcctggatggtgaatagaattaatggtcacccccaagtgcatctccccatccaaagtgggggcagtatcaccaccgataggatctgcatacccagagggccccccaggggacagcaatggagctactgtaatcatagtgtactaatctcttattaaaataggaaagagattgttgttcattgggtgcaatgttgttgatttggagtatgtgttgacaattgagtggagaaaccccagagtaacattagaggagccatttaaggcctctagacaaagcaggggctatatggaatccagccaccagcacagaaggttcgtagtatataccattccaggaacattgggcagaataccaaggctttcaatgcaaggtgagggtggagttcatcttttgtctgacttggcaaagattgattttttagtgtggtcaaatgaagtccaggttggattgcaagtgctgttgttgcagccccattggtaacaacatagccattcagaaatgttgtcagggatgattctccaaggtagaccatttttggcggcctctagcaactccacgtatagccaacattgattgcagttggcttctgttgcagcagtggctaaaaagttgatgaatttattcttggcctcagacacaaagacacaggtgctgaccattagtagataggttattccctgtaataacaaaaacagaggggaacatcatattgtttttcatctttaggaaattgtactatgccttcattttctgctttcatagctacaaggtcaccagccttagggttgggatctgatggacgctgtacccatattttggctccaggatttaagcttcctgtaccaggggatctgaatccccaagttctgtatgtagcctctgttgggcaaagatttcctcaggggttaattgtggacaaggtaccactaacaattgagcaaccagcatctgtggttttatagcaaaagaatctggagaggtattgtataaaatgtcctttaactctccccggtaatcactatcaattattccaccatacattattatgcttctcattgcaaggcttgaacatgttgtaatccatttacccacattcaagatcacagttatggtggaaatttttgcctgttgatcttcctgctgattaaatagtctgtcaagaggaagcagagacacactagcatcaacatggaaaacagggccaggcacagtgactcacacctgtaatcccagcattttgggaggctgaggtgggcagatcacaaggtcaagagattgggaccatcctggccaacatggcaaaaccccgtctctaaaattacaaaaataaactgagcatggtggctcatacctctaatcccagcactttgggaggccaaggcctgctgatcaggaggtcaagagatggagaccatcctgtttaacatggtgaaacctcatctctactaaaaatacaaaaattagctgggtatggtggtgtgtgcctgtagtcccagctactcgggaggctgaggcaggagaattgcttgaacctgggacatgaaggttgtggtgaacccagattgtgccactgcactccagcctaatgaaagagtgagactgcatctaaaaaatgaataaataaaaaataatacaaaattagctgggcgtggcagcctgtgcctgtaatccaagctacttgggaggcagaggccagaagaatcacttgaaccgtggagatggaggtggcagtgagctgagattgcaccactgcacttcaatttggtgacagggctggattccatctcaaaaacaaaaaacaacaacaaaaaaacatggaacacagtgacgatgggagtatgcaccaggattcagataccttaccaatattgttttccccaaacctctttattccgcattaaccatttgtttcattgccacttgggcacccaggtagtaagaccatttgctactgacaaagagttgatataaaagtaacaaatccctctggcctcctcctgaatagctcggagaaacgactactagttcagctaactggctgctcccaccccttccttcatcagaaatgcttatgtttttaacaggattataagccacagccctccagcattgggtcccaccaaagtatttggtggatccatcagtaaaccaagcatgtttctgatcctctgggcttagttctttaaaggatttgccccatttgatgtgtgtgtgtggggggtgtttctttccctatctgcaggacttgcttggttgtttcctgagctcgcaggttttccacatcctcatgtaaaagtgatagcccctatgattttggcttagcctggttttgtatgtcccatttccattttatgatgctactttctgggcatgccctatctggtgggttttgggggaactcatgaccaaagtcataatagaaatttcaggcctcataaagacatcgtggttgaagcagaggtgttccatttccagcaaagctcaatagcaagctaacaattgcttctcaaaagaggaataagcttttccagcctctggcagtttctgggtccaaaacatgaaaagtaccctctttccatcttgtttctgcctaaggctccaattagcatgttgatctacgacagttactcgcagttcatcaggcccatcccatataggccatagatccagggccagttgcactgcttgtttagcttgttcaaaagccatgctgtctttctctccacagtgagagtcatacctttttctagtggctgcattcagatgttgtaaaatgttacccaagtaaggaatatgatgtgttcagaatccaaacaagtcaatacatttctgggcctccttcttagtggtaggggttgcaaattatagtattttagccttagcctttggtgaagtggactgtttctttgcattccataggatgccaaagaattttacactttgtgcggatccttaattttactaggcttaatttcccatttttgagataggaactgggtttttacatgctctaagccccggctgactagttcttcagttttaccctgattgggccacctggacagctgcttttttcagcaataggctgatagctttgagcctgatcagtcaagacattgactggcattgggccagggccagtccggaagtcagattagcattttccttttccagcttatatttctcttgtagcaaccagcccctatcttgacacattaacttataagcagcaatcaaacactatccactttgtgagattccctcagcatctcctttggtgactggaatcccctgcagcacttcacgcacagtcaaaggtttaaattgcactaatttagattcccaattcccacaaaggccagttcccctgaaccattcaatcacaaagaaggagaactgggagtgatcccatctcaggatatgggaaatccttgagcctccagccctatccttctggtcaaaaaggggcccacttttgttttcaaatcctgtttgtgatgccaaaaatgttctgtatgggaaacgtgggagaggagaagaaaagacatacatacaataactttaatggtaaacaagctttaacccacatcaatatcaatgcagacagaataaactaatgatataataagcaaatgatataataagcaaataaatataatacacagattgatataataagcaaattgcagtaagaagaggagatgggaaaagatatatatatatatttaccctcactagactatggaggattaccaactgagtaggaagaaacagcccaggctccagagtcggccacccattcatgcacagacaaggagtctcatgaagcttcagggtggtctgggaccctagctcttttgtaacgagttgtttggcataaggcccagtgaggagggccatttgggacttgcctcacggaacacaaaagggtcaagttgtttttgtgattgtctattgtttttcaacaactaatgtatagtaatagaatgaaatagacatttctttgatacagctctggatgaacacctcaggggctcacaaccaggacctgttctgggacttggtgaccattgtgtccacgttcaattgagttcaaatttaacatttaacttttcctccataaattctcctgtcttcatgaattggctctgtctaggcaaagggcaaaatgaaccccttgggctgttacataacctccacctcctgggttcaagtgattctcctgcctcagcctccggagtagctgggaccacagatgtgcaccaccatacccagctaattttttacattgtgagtagagatggggtttcaccatgttggccaggctagtcttgaactcctgacctcaagtgatccacccaccttggcctcccaaagtgttgggattactggcatgagctacctgtgcctgaccctaaattatttctatctcttatagcagtttgaaattacttaaaggttgtttcaagttgaaaaaataagaagaatgtggataaaaataaaatataaatagataaaaaaattacagggattacaaaatatatatgtaaatctggagtggtcaaaaatgacaaatttgatttatttataaggttttattaaaattagctttaatcgttaatacactattaccaaagtaaaagctgattttctcttgaacaaaaattttatgtattattaatatgacagcaaaatacttctgttcacctttgaatacattcaacaagacagagagtaaaaaagagataaaatgttcccatgctctggcatggaccaggctcagctctgggaggaagccctgcctgaaaaggctgcagcttaggctgtcactcttttcttcactccgcccagcagctgatcacatcttctgtcactcagtgtctgagggggcgggaccttaagcattagccaatcagaggcgctgggctggaaaccgtccaatcaggcacgcagctggaatgaacaggacggcttccggatttggcggggtctttgtctctccctgcagctggagctccaggtcgtctgttcactgctctctgtcttcttctcctagaggcccagcctctgtggccctgtgtcctgcaggtattgggagatccacagctaagacgccaggaccccctggaagcctagaaatggtgagagtgccggtccagcatcccgagagaggtgaagtgtctgtggcgggactcaggcctcccctcagtcagctccacaatctgcaccccgaattctccttacccagctctgcctcagtcccattcagccataagatggcggctacgctgacagcctggcccccgggcgtcctgtcgcttccccgcgcagtgactgtgcccctggcctggagcgctctgtgggcagctctgcacccgcagtgccgtgtctctcccagattgtgcagggaccaccggagggtcttcaggggagaatgctgactcgcggtgcgggttcatgaatgggaagagctttggtctgtggggttcacagtttctcttttctgctattaaaattgtatggggccgggcgcggtcgttcaagcctgtaatccccgcacgttgggaggccgaggcgggcggatcacttgaggtcaggagttgaagaccagactgaccaaaatggggaaaccccttgtctactaaaaatacaaaaattaggtggatatgttggcgaatgtctgtagtcccagcttctcgggaggcagaagtgagagaatcgcttgaacccgggaggcggaggttgcagtgagctgaaatcctgccactgcactccagcctgggcgacagagcaagactcttgtctaaaaaaaaaaaaaaaaaaaaaaaattatgggagtcactgcaaaaatatcaaacaatttaatcaaagagtgattcaagaattgtagagcacccagctatagtttgtagtttgtggtccatgggagaggcttgaagaaaagacatttataaaatgcatgatgaggaaaaccaaattcaataatttgttaggtttagtaatgtagtttcttaatttgtacaatcaaggtggaaatttcctggttatgtaattagagcttaattggcagtttatagttgctgaagcctgaattttgtttcccctaatgtagtaatttgccaaaaaatgcacttgagcttagatttttttttttttttttttttagaaatagaaatccggggactagagcctcttcagtctaattgcctgccacttaattattttcacatcccacaggggactgactttccctggcatttttcacatgtgtcccaagcagggcctcaagtgtcccccatgttcctcaattaattattattattattattattttttgagacggagtcttgctctgtcgccaggctagagtgcagtgtcagatcttggctcactgcaacctccacctcatgggttcaagcgattctcctgcttcagcctctccagtagttgggactacaggcaagcgccaccactcccagctagttttcatatttttagtagagatgaggtttcaccatgtttgccaggaatgctagttaccaaggaaaaatatagggaaaatctctcttccattttggctgtagacaatgaatatatttccacaggaaaatgtggtagataattgaggagttacatggattcatcaacacattagttcctctttttgcagggtaaattttttctatatccttttattttgatttctgagttaaatgctaaattttaagtgatgaaacatggtaccttctagaagtgttcccatatgactaattttttactacattattttatttatttacttatttttttgaaacagagtctcactccgtcaccaggttggagtgcagtggcgtgatctcggctcacgcaacctctgcctcccaggttcaagcagttctcctgcctcagcctcccaagtagctgggattacaggtgtgtgtcaccacgtccagccaatttttttgtgtttttagtagagacagggtttcaccatgttggccaaaatgttctcaatcttctgacctcgtgatctacccaccttggccttccaaagtgttgggattagaggcgtgagccacagtgcccggcctactgcattatttttaagataaataataaaataatacatacattgtctgaaagaagtagatatatatgcttttcttataggggtataaaatgcaagcatcttagccaggtgcagtggctcatgcctgtagtttcagcactttgggaggcctagacaggttgattacttgaggtcaggaatttgagaccagcctgcccaacatggtgaaactcatctctactaaaaatacaaaagttagccaggtgtggtggcatatgcctgtattcccagctacttgggaggctgaggaacaagaatgtcttgaacccgggaggtggaggttgcagtgagccgagatcatgccactgaactccagcctgggccacagagtgagacttcgtctcaaaaaaaaaaaaaaaaaagtaagaaccttaaaatttccttcccttatgtaaacactgcgtttgagtaatttccctggatttttcaaacacatagtttcaaaaactaagtgagtaattctgacatggaaattaaagcttgaacctagtgactccaagctaaggctaataattaagcctgcaactggatattgaagactcagttagttttttctggggagcctcccgtgcaggtgtccagcctgctcaccccagccatagaaggagcctttatcctgagagaagctacagagccctggaaagctggggtcccacaggcagatgcagttgaggttaagatgaaaggaaactgagagggtcttactgatgatgcagtcgttatgttttgtggcactttctgtactttgtaaaataaaaacattagatttatgtaaaaaaaaaatgaattccaaaaaattattgcaacaggagaaagtaccaactaaatataagatctttatggcttgcaaagatgtaggcagaaaagggctttcttttttagggagaggtaaacaagataagaaaggaggtgggaggtgaatggcaaatggagagtgaaaaagtcagattttagatcagaggatgtcttaccctgaaatcagcatgttcttaggaggaatgtaaaatggggttgtatgttgactcagactgagggtagctcaaagttcaggagcctgagggagggaaataaacttaagaaaagtatgattaagaaatattttattttagtccgggcccagtggctcatgcctgtgatctcaacactttgggagtctgaggcagtcggatcacctgaggacaggtgtttgagaccagcctggccaacatgatgaaatcctgtctctactaaaaatacaaaaattactggaaggctgaggtgggcggatcacctgaggttgggagtttaagaccagcctgaccaacatggagaaatcccatcactacaaaaaaaaaaaaaaaatcaacaggtgtggtggtgcatgcctgtaatcccatctactcgggaggctgaggcaggagaatcgcttgaactcgggaggtaaatgttgtactgagctgagattgcaccagtgcactccagcctgggcaacgagagtgaaactctgtctcaaaaaaaaaaaaaaaacaccaaaacaacaaaaattcgccaggtgtggtgatgggcacctgtaatcccagctacttgggaggctgaggcaggataattgcttgaacccaggaggtggaggttgctgttagccaagatcgcatcactgcactccagcctgggtgacaaagtgaagaaattattttgagcactgaagacaaattcagctgtttttttaatgagaaaaaggagaaaatgtgcagagcgtgtgtctgcctgtgtgataggtaagaaaagagagcactatcttagtcataatgggaagagtgtttgtttgcataaattgttcctggagcacacaaagaatggagaattttattaatcacaaacattttccagtattatctatgtgtttcatctttccccatttcttttctttgttctatgcatttctcccatttggcttttcctgggctgcgtctcacatattaaactggtaaacataactacagtgttttgctaagttctgtgagtagctctaccagattattaaaattcagagaggttatgggactaacaagtttttaaacagtagctcagaagcatagatgggcccatggggtttttgactggcatctgcagtgaggacagtgttgtaggaccaagccctgaatcagggtctgtgttgactctgggtggtgtcagaattcaaatgttagacaataagttggtgttggagaattgtttaatgttcagctaactctacagatttggtgccagaaaaaagatatcacagaggcctggcctggaataaaactaggtgtttgggaatgggagctctgctttcccatacacaggctgtcacactgcccattgtcctgtgattcaggtcttctcccagggtgacagaggactgaaaacttagaggacaggagctctgattacagacccccttttcccacagctgccaccacaagattcccacccactcacaaacacacacactagacattgacacgtccacactcctcccaggactaggcaccaccctcagaaacttcaccacagcatttttgaccctagtgtttcttgccaagaacccacaagtctctgcaagtctcctggcatatccccatccacagatgctaaatctgcagcagcaaccagttttctccaccaacctaccattttggatcagctgttcataatctcatctgcctgcacacagtaataaatcagagtatggctgcattgggaccactatctgcagcaaaaatcagtcctctcacctgcattgcactctctcctgcccagggatttaattttttattttagcttttatttttgattcggggtacacgtgggtttcttttacaggtaaaattatgtcatgggggttttgtgtgcagattattttgttaacttacgtactaagcatagcaccaaacaggtatgttttctgatcctctgagttctcccaccctccaccctcaactaggcctcagtgtctgttgttctcctctttgtgttcgtgtgttcttattatttagctcttacttataaatgatagtacattcatttggttttctgtttctgcattattttatcttttttttttttggagacggagttttactcttgttgcccaggctggagtgcaatggtgtgatgtaggctcacctcaacttccacctcccggttcaagtgattctcctgcctcagcctcatgagtagctgggattacaggtgcattccaccatgcccagctaattttgtatttttaatagagatggagtttctccatgttgggcaggctggtctccaactcctaacctcaagtgatcaacccacctcggcctcccaaagcgctgggattacaggtgtgagcactgcgccaggcctctgcatttgttttctaagaaaaatagtgtccagcttcattgatgttattgcaaaggacgtgatttttttttaatggccacagagtattccatgatgtttacgtaccatattttgttttgactaaatcttttattttattttatagttggagacagagtctcacttattgcccaggccagagtgccatggcgtgatattggcttactttaacctcaacctcccaggctaaagcaattctctcctacctcatcttcccaagaagctaggactacacctgggcgttaccacacctggccaaattttctttttgtattttccgtggagacaggattttgccatgttgcccaggctgttctcaaacttctaagttcaggcagttcacctgccttggcctcccaaagtgctggaattacaggcatgggccaccgcttctgaccataccatattttctttacccagtctaccattgataggcatttagggcctgtccttgtctttgctattgtgaatagtgctgcagtgaacatgcatgtggatgtgtctttataatataataatttatatttccttgggtatatacccaattttgagatttctgggtcaaatgataattctgttattagttctgtgaggaaccgccacactgctttttacaattgttaaactaatttacactcccaccagaagagtataagcattctgttttctctgcaaccttgccagcatctgttattttttgactttttaaaaatagccattctgactggtgtgaggtggtatctcattgtggtttttcttttaatttctctagtgattagtaatgagcatttttttcatatgcttgttagccacatgtatatcttcttttgaaaagaatctgtgtttttgcctacaatttaatgaagttgtttggttttttcttttaaacttgtataagtttttaataaattctggatattagacctttgtcagaggcaaagtttgcaaatattttctttcattctgtaggttgtctttttcctctgttgatagtttcctttgctgtgaagaagttccatttgtcaatttttgcttttgttgcaattgcttttggtagcttcatcatgaagtctttgccagtttctgtgtctagaatggtgtttcttaggttatcgtgcagattttcttataattttaagtttacatttaagtgtttaatttatcttgagttgatttttgtatatggtgtaatgaagggatctagtttcagtcttctacatagtgctaggtagttattttagcaccatttgttaaatagagaattcttgctgcattcctcttgtcagctttgtcaaaaatctgatggttataggagggtggcattatttctgggctctctattctgttgcattggtcttgtgcactcgtggattttttataacatctttctctcttctcctttttccccataaacattctttgaagtgcatacagtgtgaaaaattcagatgtccaagagttcaaaactatttaaaaagttccaaaacaaattttgctattctgtctgttcttaagggatttagattatatgtagatatttttctctgcttttttgaaatatatgtaaatcatattaacagctaaataaacctttttcattttttatgactccagattatctttatctggtacttcagatttattgctttgtttttgcttctgaaaagtttatttttttcatttttagtcctttaaggtagacacagatttgtttagttaaaactcatttaagagcacacagaagcatagcacaaagataaaattaaatttagcaatacagaatgataaagactaaaagatactaagtttctttgacagaaacctgattatccaaggtaattatccaatatttgcaggctgaagtactaatactgcaaatgcaagaacagttcaatgcatgaactcaacagtggaatctgtagttgtaccttgttttctatttattacttcagaacaattagcatagttatgtttagtgtttgtagacaaactgcattcatataaattaaacagtgtttcctcttttttgagacagactctcactctgtttcccaggctggagtgcagtggcgtgatctcagctgactgcaactgctgcctcccagattcaagtgattctcctgcctcagcctcctgagtagctgggattacaagtgcacaccaccatgcctggctaagtttttgtatttttagtaaagatagggtctcaccatgttgtccagcttgatcttgaactcctgacctcaagtgatctacccatctcagcctcaagttgctgggattacaggggtgagccataagcagtattttctacaatattatgaatataaagccacaatacttactttgaatcacttaaatggttattttaatattgtaatttatacttttgaaatataaagtgttttaactgaagtatagttacagtttttaaaaatggtacatatactatgacgttcattaaaattattcatacttagatatttatatctaatagccagagaaaatttactaccaaattattacagtagatatttgtctgacatatttattactttattcaataggaataacaatgagtaaacacaatttaggtatcttttatttcactaaattggtatgttcctattacaggacagataaagacaggtgatgtggccaccccaacaccataatacctcttcagttagctatgttgcaagttctaatatattccactatacgaacacaatcagattctatttcttcatcaaaaagtgttgtttgaagttgtcagatgtatttcaatatagaacccccattcaatggctagaagatgagacagcagcagagatggaaaagaaactttataaaattattctttctgaaaatctgcaccctcctaatgctcatgtttctcatggtgagagtagctatacactttgagtgtttcgagagaaatttattttaggagaatattttctggctgacttaacaatcttatatctaatctgacctttttcttaagatctttttaacttccttctctcaaaattatcttgctcagagggagatctgtttttctctccaatgctttgtctgtttcagaagccttactagtatcccgtggtgtctgaatgaggtgggttgtcacagtgaaaacttctgatgttatctctatctggactcatgttggaaattcaatattttttccatgtcaccattataagtagaaagtgaggctgaaacactgctcccagtttcattattgtgaagatatgattctacccaggaggcctgcaggctctcctcctgcagctcaggcctcactctctgttgtgacattagagtgttgctgtggcaaatgtagttcacataaaatgtgagctgtgctctgggctgtgcctcagtggcagatagtagaggtcaagagaggagaccagcaaccaggggaaagcaagcaggagtgctgtagcccagtgccagggagtacagagccactgctctaaaatgtaaatagccaaagagagaatcctattcaaccatttttgtagcagagtgaaagcctaccttcagcagccactgggcttcaagctgctaaactacctcctgttctgaagatgtggaaagtttatttgtcattggatataagcatttagcatacccagatgccctattccatctccaggtgattttaggatgaactatgtgtgacatggtgctataaattcttctacttgtggactaattatggtgaccatctttccatctttgtattctgttaaacatattgaccatgatgtatgtcactttcaagtttaattttataagaaagccattttctttctctggggctgaagaaaccattttctttttctggggctggagcttctctggggctggagaaaatttttcttctttttctgtttttgtttgtttgtttgtttgttttttgagatagaggtctcactctgtcaccaaggctgagtgtagtggcatgatctcagctcactgcaacctacagctcccgggttcaagtgactctcctgcctcagcctcctgagtagctgggattacaggcacctgccactgtgctgggctcattttcatgttgttagtaaagatggggtttcactgtgttggctaagctggtctcaaactcctgacctcagttgatctgcccacctcagcctcccagagtcctagtcctgggattacaggtgtgagtcactactcccagcccaatttttcttttaattattgtttccaaacactgtctagaattaccagatgtgatataaacacataaggtgccaaccagaatttactctagaggggactttccctctcaggcttccagtcaacttatacttgtgcagcaaagtgcacgctgtcccctaaatatgcaggcagaattgtgtctctgcctatttggtatctagagttctctacaatcacttctagagaggctagatcaaatttctacaaacttcacgggcagcaatcaatcattttacctctttcactgactcttgtatcttcagactgaaactgattcagagaatatggagcccagaaacccaatcagagtaacatgtgtgcattgagtagacatagagacatgagaatctccactttcttcttcctcctcttgccaaaatgcccacaaacgtacaggtaatacctgctgctactccagccattcaggccataaatctgcagcttcaaattttgaatccaggtcatgagatttgagaaataaaaaacttttatctgaaaaatgcaagtccttttggttatcaaactcagagagacattaaaataaaagtgcagttacatctttatcctattaactatgtattaatctcttgaaactgttccctattggcacaagtagctataaatgacactaataatgccacattggacactatatttttgtttgtttgtttttgagatggagtttcaatcttgttgcccaggctgagtgcaatggcacaatcttggctccctgcaacctctgcctcctgggttaaagcagttcttctgtctcagcctccccagtagctgggattacagacatatgccactatgaccagctaattttgtatttttagtagagatgggatttctccatgttggtcaggctggtcttgaacttctgacctcaagtgatctgcccacctcggcctcccaaagtgctgggattacaggcttgagccactgagcctggcctggacactatattttataccctaaaccattatgatatatatctaattaataatcaatgctatttctgtaaataaaaatttctgaaaaacaactttgtgtcagcccactctctgtccctctgttgttgtctttacaaatcctcttgtaattgctgctaattaaagtgtagattccaggcaacttgaatctttgctcccaggttatgatccttaaacttgacccaaataaactgtctacttatgttcatgttgtgtcagccttttttaatatatatatagacttatcatttagaatgtgctagagcagccttcatgaggggatctctacttagattgtattccacttgctgtaacatcaaaggatgcagagccaggttgatcctacctagaatctgcaattaaggtctggcctctgcctgggatttacaaaaaagcctggactttggatagaaaatgtacagaaaactaacaaaaggcattttctgcgttgtgagatgtcaacctaaacatcttacagccccattttgggagtgtggctctttgagatttttcacatcttgttcattgacctgctacagtgatgtgagaggctccaggaggaaatagaatctgatggcagaatttgtaagtgtaaataagcatcttaggcatgagagatcaaggccacaaagtatccagagccatgatcacaattataattacctgtaaagtggaatactggagaagagttatttttgttatttcctttacccatgagctagcaaatcagaatgggtgttccaggttctggagttccaccagggcagttccattttctatttagaatcagcctgagtctctccagcctggttgatcattgggccatcagcccagggtcactgggaattccctcaaaatcacctaggtgtctttgaggtatttgaggatgttcagagcagaattgtgttagactgacaagagtggttaattctgcttctgtctcagtgtaagagaaatgagtcatcctgtgttttttcatcccctcatacaagaggtatctttggttgctacccagatgagagtttctccagtttcctgttacttggatgataaagaaggaggagatctggagactcaaacagataaactagttgcttcaatttcatatagccattaaaaaaccatgaagcagtcatggttcctacagtccagaaatgtttagtctagactagcaactggataaataattatgcatcatatggttggtacaataaacacgtgtccaaaatcttgggctttatttagtctactttgtttatattgtgacttctgatgtctacatctcaaggcatatttatgaacagaaggattattataatttttattttgagacggagtctgtgtcacccaggctggagtacagtggtgtgatcttggctcactgcaacttctgccaccctggttcaagtgattctcctgcttcagcctcctgagtagctggcattacagttgctggccaccatgcccagccaatttttgcatttttagtagagacagggtttcaccatcttggtcagactggtctcaaactcctgatgttgtgatctacccgcgtcatcctcctgaagcgctgggattacaggtgtgagccaccacgcctggccatataatttctatttcttttaccttgctaagtgtacatatttattttctaataaaattaccctagaaaggctgggcatggttgttcatgcttgtaatctcagcactttgggggtctaaggcaggtggatcacaaggtcaggagtttgagaccagcctgaccaatgtggtgaaacgccgtctctactaataatacaaaaattagctgggcgtggtggcacacatctgtagtttcagctactcaggaggctgaggtagaagaatcacttgaacccaggaggcagagcttgtagtgagctgaaatggcaccactgcactccagcctgtgcaatagagtgagacttcatctatttaaaaaaaaaaaagttaccctagaaaaccttaaaggatttgtttaaattgcgtattagtatgtagcataaagttgacagggcagtggctagaaaatattaaaattacagaaattctgggatttaagtttttcttttaggtaacctttgaaaaaagaatactggtagtactgcagtggcatagagggaagaattctacatagagtccccaccctgcctcagacctgttcagattcaccctttttggaggccttattttggtctgactataccttggagtctttcctcagagaactgattagaagagatcagagttttggctggtgaatcctgttgcctttctagagctggtgttcacaatttcttgaaacccaaaaacagataaatgggataaataacgtatgtattttagggtcctagattttaaatgttctattaaaaccagtgtttgcagagacattatatttagacacttgttttctattcctgcagatccagtagttgctccataagtcacaaaaaagtaaatataaagagaataaaattttgtctaaactacattaacctctttctttctgtatctctttcatctgtctatatttagcttttattccttataatttaaaaaaaattgatgacagaggaacagaagaagaaatagagattctgggcccttttttgaaatcctggaaattattaaacccttagtaccagctcccaggatgttacgagaattaaatcacataatgtgttatgcccagcacagtgctctgtatcatgctcttgagcacacagtatctgtttaataaacattgcattagtacatgtgtacatgttgtttttaaaatacagacttattcagacattgctgccttctgtttcctctccttgtttgtaccagaagtatttggttgtgacaagagtgctaagtgtaagggatcctgtgctgtgcctgcttctctaactaatgtaaataatgcgccaagggggagcaacatcagctttgacaggggacttgtttaaaacacccatgcatagacccttttcaaatctgcagaattacattacataaagtggggccaaaattaccaagtgatttataagcttgttaaagcttgagaggcaatgcttagcttagtgattatcagcccagggttctcattaggatcacatggccaatttgcagaaatctcttgtgccctccccacaggttctgtttattgttctgggtggaagcatccacgttgttttaatgaagggcctcatgtgactctaaggtgaggccagaatcaagtatgaaggcttcaaaatacattcatgagagttaaattccacctttgcactaaagggtggtcacagggcctattctatttgggtttggtagggacaggtcagtgtggtgcatatttccattactgtggcagaaattgctggtgtctgtggcaggggagggcacctgaggacaggaaaggagaaacttatattttcatcttcatggagcagctcattgctcctgaatctcttctgttttaaaggatagaaatggatggatttttctgtctttttctgccaattgatgccatgctagctggtaaacatgtggcactgacacctttaaaggcatattctcaagatgcaggggtaatttgtccagagaatcttcatctgagaaggaattccagagaaggaggagatcagaaagagaaaaaaaaagggcttcaggtaaacatgcctcagctgaaaagctatgtccactctgcctcctggaatgccatgtatctagtacttgaaaacttttacttctctacttgtgtttttcctccctaaggagtttggtttaagtacttcttaaaattcttatgatagtcaaacgtgtctgaaaagtatttcttccctgtatcccagagccttctcttcattctctacatcataacttcttatacgccatgcagatttatcaacaggaatttatgatctgcaatattaaaaatgttccgtttgtggctgttgaacatggaaagatgtggatactcaagatttctattggggaaaactgtggtccttagtaaagatggagaaaatataatgttgaggctccattcatgtgttccattagctgtatgctgaacaggattaaggaattgcttatttaggtcgggcgtggtggctcatgcctgtaatcccagcactttgggaggtcaaggcaggcagatcgcctgaagtcaggaattcgagaccaacctggccaacatggtggaaccccgtccctactaaaaatataacaattagcctggcgtgatggcaggcacctgtaatcccagctacttgggaggctgagggaggagaaccacttgaacccaggaggcggaggttgcagtgagctgagatcgtgccattgcactccagcctgggggacaagagtgagacttaatctcaaaaaaaaaaaaaaaaaaaagaaaattgctcatttaaatgtgatggcatttattacccagaaattctgaaaaaaattattaggagatacctgctttctagggtgttaatgaagcctgcttaatattactactaaaaattacagaacataggaggtatctgtattttgaggtttgcataaaactgatgattctttttgattacattcagattttatttgctttttttaaaaaggaatatttcaatagtgatgctgtattcttctgtatgcattaacacatcataaaaatttgtcctagtgcagttaatggttaatgattcacttgcttaaataggtctctgacagacttttttttactatatagctaattatttttctcttcattattaagtttcattatgcagctgatgtgaacaaacaatcatttaatctggcagctgttcttttttctttttttctacatatttttctttggaaaattaaggctcttatctttgtttacaggccagaaaaactggaaaaaacacaggctcttccacttactggatgtttgacaaaatattcttcttgggccaaaaacattgacattattggttagcttgctagaaattcaaaaaatcagactttattccagatcttctggaaaaaaaccctgcataacaaggtcttcagcttattgtacatattaaaacatgcctttttcatctgaaaaatattcacaactcattccatatgatgtaaatatagcactcaaaaatgtacatgtttgtgttcatgcccttaattttatagtttattttctagaaaaatatatgaactgatgttgtggatcttatgttcctttattttctcagagttagagaatactttagagaatatttctgtgttgaaaattattttataggataactttagtcagtcctataagtcagaaccagttatctttactctctcatttcaccttaagtcaaattaaaaattccgcccataaccacttggtgaaaatgtgtgtgtgtatatttttcaggggccattgcaatttagagatgtggccatagaattctctctggaggagtggcattgcctggacatggcacagcggaatttatatagggatgtgatgttagagaactacagaaacctggtctttcttggtgagaaaaactttaatacataactcataatatacacaaattgttttatttctcttttttgtagaatgttagtaatttattctttttataaaagagtttcagatccagtttttcaagaaaatcttcagaatttgttcatttagaaaagaattactttggtgcctcatgcctgtaatcccagcactttgggaggctgaggcagggggattacctgaggccaggagtttgagaccagctggccaaaatgctgaaaccccaactctaataaaagtacaaaaaattagctgcgggctgtggcatgcacctataatcccaggactcaggagggtgaggcaggagaatcacttgaactcaggaggtgaaggttgcagtgagttgagatcatgacattgcactgcagcctgggcaacagagcaagattctgtctcaaggaagaaaaaaaaaaaagaaagaaaaaaatttcttcaagatatttcatcttaatacaaactttccacatttctgaggtgagttatattcttcactctaaattagtggtaattccagaaatttactgacttaaaatattgtagcttccacctgaaaatctacttgccaccaccaagttttgattcagtagtaccaggtagtaaaattaggaaacctacaaattgaaagtattttcttttcttttcttttcttttcttttcttttcttttttttttttttttgagacagagtctcactctgttccccaggctggagtgcagtggtgcaatctgggcttactgcaacatccacctcccaagtttctcctgcctcagcctcccgagtatgtgggactacaggcacacatcactatgctccgctaatttttgtattttcagtagagatggggtttcaccatgctggccaggctggtctcaaactcctgaccttaggatctgcctgcctcggcctcccaaggtgctgagattacaggcatgagccactgcaccaggcaaattggaagtattttctaaatatttagaaatctctgttacaaatttgtattttgttattaatttactagaatattttatcacatcatctttcctgagcacattactagcttgtaattggagaatgtgagcaagattcatgttatttatttttgataaaacaggtattgttgtctcaaagccagacctcatcacccatctggagcaaggaaaaaaaccttcgactatgcagagacatgagatggtagccaacccctcaggtaggtgtgagtgaaaatgaatacaacagacaacacagtaagaagtccaaggtcaaaaagaaagccagtccttaaggtgtgattctggaagctgtgttccaaaggaacttctgggcagctgttttttttgttttttgtttttgtttttgttgttttaaattttgctgtcacaaaggggcatattgtcttatgcttctaaattctctaaaaattctacttttctctcagtgagcttccttcacattcacagtgagagccaaagtcctcttcatgacatataagagacagcacaatccagctgctttttcattgttttggggacacacaaatatcttcctaattttgagaaactgaaactattttttagttttctttttgtatccggtctgaaatttgtgagagtagtagtttctgttgcatttttttttgttcatttttgtgcacagtccattctatttttattactatatagtcttgaaatatagtttgaaattgtaagtacgatattctgttttcttctttttcctcaagattgctttggctattcaaagtttattttagtttcatgtaaattttagaattgtattttccattattgtaaaaaaaaacactgcaattttaataggaagattattgagtctgtaaatcactttggataatatgattctttaataatatttattcttttaattcattgacataaaatattttaaaattaatttttatcttctaatttttttattttgttattgtaaacttttttttacctccttggttaatttttttctcaggaatttatttaatgctatattaaataagattttttcttcctcatcagatagtttgttttaagtgtaagaaaccatacatatacttgtgtgtttaattttatattttgctaatttactgagtgtatttattagtttagacaggttttaatgtactgtttatggttttttaaatataaaattgtgtgatttacaaccagcaacttttttttttttttttttgagaggggctttcactctttttgcccaggctaaagtgcaatggtgtgattttgactcactgcaacctttgcctcctgggctcaagtggctctcctgcctcagcctcctgagtagctgggattacaggtgttcaccacaacacccagctacttttttgtatttttttggtagagacggtgtttcaccatgttggcaaggctggtctcaaactcctgacctcagatgatctgcccgcctctgcctcccaaaatgttgggattacagccatgagccaccatgcctggctggatttttttatttctgtgaataattcttctgccacatacttccatcactacattcaaatagaagcattgacaatggacacaatatagttttgtattggtgtctgaatttgatggagtaaacacctcttcaagttttcataaactgattttagaagcatttccttagggaactgtgtgggtttctttttttctttttcttttttttttttgagatggagttttgctcctgttgcccaagatggagtgcaatggtgcgatctcatctcaccacaacctccgcctcttgggttccagtgattctcctgcctcagcctcccaagtagctgcaaatacaggcatgcgccaccatgcctgggtaattttgtatttttagtagagaaggtgtttctccatgttggtcaggctggtcttgaactcctgacctcaggcgatccgcccgcctcagcctcccaaattgctggaattacaggtgtgaggcactgtaccctgcccaattgtgtgggtttctatgtaggcagaactgaccataaacttggctcaggtaactgaaactgagtcatagaaccgcttcagggatcccagtaaagtccaaagtctgcaggcctgcctacattgttgtaaatgggtgccttcctccaggtctcttgaatgtcaggacctctgccagactctgactgggaggagtttggattggttacagagtaagttcagaattctcagtgggaccaagttgggtgaaccctatctggtctgtagccatgagtaggggtcctgcagtttcccacctgactaagggcaggttctcttctgaatagaacacttctcaatcttaagctttagcagcatttcacaactccctccctggatctcaaatctctcttagtggcgtgtattttggagatggggtcttgctacataacccaggctggtctcaaaatcctggcctgaagcagttctccaacgttaatgtaccatgtatctgtcattacaggtgtgagccataatgcctatttctctcataaaggcatttttgtcagagatggctgacttttttttttgctgtaagggagtatgaaaatagggacttttaatcttttcatcttactgatgtcactctccctatacatttttactttctattttctctttcagatttgtctgtaaatttagattcagatatttaggacaatgtgctagaatttgcatggtatgcctgaagtaaattagataactcatagggacccatattactaaaatagttacttatgaatttaagtttgctgcaggcaaaaaggaattaaaggattttcatcttttttttagcctatatctaaataataacatagtttatttctcaatatttgttttacatatcagagggtctaaccctattctgcaaattgtataattttaaatttaacaatgtaaggctactctttgcttctaaagtttgattatagctgttttattttgtgtaaaaataccatatatttaaaacattaaaagtaactagtttccttaaaatgctaatttttaagtttctcattagaatcttctatttataattatactgcatattctctgaaattttactgccacacagggcatgccaatgattcaaaatacctgcatttagtgagtacacactaacagttaaatatttcagttacctagaaacatttttattttttttgagatggagtcacactctgtcacccagcctgcggtgcagtggtgtgatcgtggctcactgcaacttccaccttccaggttcaagcaattctcatgcctcagtctctcaagtagctggggttacaggcatgtgtcaccacccctggcaaatttttgtatttttagtagagacagggcttcaccaagttcgccaggctggtcttgaacttatgacctcaggtgagctgcttgccttggccttccaaagtgttgagataacagttgtgagccaccacacccggcctgacaattttttaataatgcatcaatgttgcatgctagattttttttttttttttttttttttttttttttttttgagacggagtctcgctgtcgcccaggctggagtgcagtggcgcaatctcggctcactgcaggctccgccccctggggttcacgccattctcctgcctcagcctcccgagtagctgggactacaggcgcccgccacctcgcccggctaattttttgtatttttagtagagacggggtttcaccgtgttagccaggatggtctcgatctcctgacctcgtgatccgcccgcctcggcctcccaaagtgctgggattacaggcgtgagccaccgcgcccggccgattttatgagtaaacatttattattgttttgaagttttatattagtgtgtttttcagtgtaggttttttttttttgggatggagtcttgctctgtcacccaggctggagtgcattggcgtgatcttggctcactgtaacctcttcctcgagggctcaagtgattcttctgccttgacctcctgagtagctgggactactggcgtgtgccaccatgcctggctaatttttgtatttttagaagagatggggtttcaccatattggccagtctggtctggaactggtgacctcgtgatttgcacacctcagcctcccaaagtactgggattacagttatgatccactgcacctggcctcagtgtaggtttcttaccattagtttattgggtgttttggttttacttatgtattataattttagacaatttgcaattctgcttgtatactttaagtcaattttaggtttaagagataaattatgcatgtctgtcacaatcaggttacatatgtatgtctgtttataaatatgacaccaattttagttatggcttatcttatactctttcttagcttattttccatggtagttttatcttgtctaagtaagtactcatggggatagtcttattttaccatgtgtttagtaattaatatgtatttcctttcatgagagaaacatttttgtgatttgaaggtaattttcaaaaaaatatgtaatttttttttcagtttttctttaaaaaaattgttttaaaaacacataatgtaaaatttaccatcttaaatctattgaagtgtacatttcagggccaggcgtggtggtggctctgatctgtaatcccaggattttgggaggccaagacaggaggatacctggagcccaaaagtttgagaccagcctgggcagcatatggagactctcctctataaaaaaaattaataatagccaggcatggtggtgtgcagctgtggtcccagctacttgggagattgagggggagtcaaaattgtgccactacactttagcttaggtgacacagtgagaccccgtctcaaaaaaagagctgttcatttcaggcatgttaattatattcacactgtcatgcaaaaggcttctagaaactttacatcttgtaaaactaaaactcaatgcccattaagtaacaactgctcattttacactctttccagcccttgacagacaaaccttctactttctgattttatgattttgactacttaagatatctcatataagtggaatcatacagtatccataattttgttactggattaattcaggtggcataatattttcaatgttcatcttaaaatgtgacaagattattctttttaaagtggaataatattccattgtatgtgtatgttatattttttgatgtgtttataaattaagagatatatgctggtttagccttttggcttttgtgaatactggtacaaaatacatgtattttcaattatgtcttccaggtcctgtgttgcatattttgtttttttgttgttgttttctttctttctttctttttctttctttcttttttttttttttgagatggaatcttgctctgttgcccaggctaaagtgcagtggtgcgatctcagctcactgcaagctctgccttctgggttcaagtgattcccctacctcagcctcccaagtagctgggattacaggtgcacgtcacatcgccaaggtaatttttgtgtttttagtagaaatggtatttcaccatgttggccaggctcgtctcaaactcctgacctcaggttatctgcccacctcaacctcccaaagtgctaggattacaggcttgagctactgcacctggcctgtgttacatattttagatatagatttataaatgaggaatatttataacattttaaaataatggctgtgtctttgttttccaccagcaatcaacatggattttatttttacacctaatgagtgtgaggcgattttgttggtattgtgttttttgttttcatttctctacaaattagtaattttgtgtgttttttcaaatgctttttcccatttgtttatttttatgtctaagtattttatttaaaatatattattgtatcattcaaggaaataatccaacttcattttatcagtgttgacattcagttttcaacatcattttttgaagagattatttctctctattttgtatgcatggcaactctgtggaagatcatttgatcatatacagaacggtttatttctgagctctctattctgttcttttatctgtttgtctttgtgtatcacattgtttaaattccatagcttttaactgtaggttgtattgacatctttgaaaaataaaatttgttgccccctgagcaagaatatgttgaagagtgtgtttcatattcacatatttgtgaatctgccagtttgacttttgcttttaattcctagtttcataaagtttttgttagaaaacacacagtgtataattttagtgtttttaaagtgattggttgttgttttgagacaagatcttactgtcacccaggctccaatgcagtggcataattgtggctcactgtagcctcagcctcctgggctcaagtgatcctttcacctcagttttttgagtagctaggactacagacatgcactaccatgtctggctaattgtttgctagtttatagtgttaggatctcactattttgcccaggctggtctcaaacttttggccccagtggatctcccaaagtgttagaattataggcaggagccatggcacccagtaggtatttttaaatttaataaagcttgggtatgtgtcctaacagaatacaccagatgcaaataagaatattgtgtattatcttggttttgatgggagagtattttatgtatctatgaagcctatttggtctataatatggtttggatgtccttgttgtccaaacctcatgctgcaatataaatcctcaatgttgggtgtgggacctggtgggacatatttgggtcatgagggtgaatttctcatgaatggcttggtacatactcttggcaaccaaaaagattagactctatcaattcaaataagagctggttcattaaaagaacatggcttcttcacctcacacttactctgtctcttaccatataatatatccagttattccttaccttccaccatgattttaagcttcctgaaatcctcattagaagcacatgctgacacacacttcttgtacagtctgctgagctgtgagccaaataaaccttttttctttataaattatgcactctcaagtattgctctatatgcaaaataattaatatggtctataatattgtcacagttttctctttcttagtttttatctgaattttctatttattaattgcaaatgggttcttgctgtctacaattattatgttgctatgtatgccttgcttcacttttgtcaatatttgctttatatattttggagccctgatgttatatacacatatacatatagatagataaatattatagttatagattcctgctaaatcaattcactttaccataatataatatcagtcattgtcccatggtcgtacttgacttaaagcatattctgtctaatataattatgaccaccttactcaattgtggttactattttcatggtacataactttttttcattctgttactttcaccctatttgactcaatgctaaaatgagtctcttgtagggagcatagtgtatgctttttaaaaaaccactcaggcattctatatctttttttaatattttcattatgcatatattcatttattattcattttattttattttattttttgagatggagtttcactgttgttacccaggctggagtgcaatggtgcaatctcagctcactgcaatcttcacctcctgggttcaagtgattctcctgcctcagccttccaagtagctgggattacaggcacatgccaccacacctggctaattttttgcatttttagtagagatggggttttcccatgatggccaggctcatcttgaactcctgacctcaggtaacctgcccaccttggcctcccaaactattgggattacaggtgtgagccactgcatccggcctcatgtatttttgagatagggtctcactctgtcaaccaggctgatttgcatggctcacggctgcttgaacctcccaaactcagatgatcctctcatttcagcctctcaagtagctgggttacatgaatgtgccctcacacccagctagctttttttgtatttttcatagagacagagttttgccatgttgcccaggctgatcttgaacttttgggatcaagtaatcggcccaccttggccatccaaagtcctaagattacatttcaaagattacatttcatttcattaagtagtttaatgagagtcctgtatttttgtatctactgaatgatgtggtgacagaaatttgcattgcttttactattagtaaaattagtaacaatgcagtaattatgcaaaagctaatatatgtgctgccttctgttttattggtttactttttcacctttatactcataacaaattattttaattctgtagctttttgatgtgttttgaaatcagaaatggtaatgcctccaacattgttccattttggtagattgttgggtactttattgtctctttagattccatatacttttggatttgctgtttttatttcttcaaaaatgcaatgagacatttgaaaaacattgaattaaatctgtagattaaattgagcagtacagacatcttcacaatattaattatttctttttcagtttgtttttgaggtggagttaaaatcactcacctcgacctcccaaagtgctgggattacaggtgtgagtcactgcacacagcccagttttctgaacaagtgcatgctcaagagtgtgttttctcatttccatatatttgtaaatttatcaattatttatattattgttttatactctaattccatttttgtcatagaaagtaatctataaaatttcagttttaaaaaatgtgttaaggcttcatttttggcctaacttgtggtctatataggagaatgctgtatgagctattgagaaggctgtgtatcctgatgttgttgaggagtgttctctataccttcattagaaataattgttttttactgccttctagtcctctgttcccttattaatattctgtcttgttttattattacagaaaatgaagtattgaaatatcctactataattatattgctctctgtgtgtattcaattttgtatttgctttatatatttgaaactctaatctgagacacacacatgcaaatacatacatgtataaacaaatttgtcatagattcccagtgaaagaatacatatattgtttaaagcccttctttgccttcttgaagttttgacttaaagtacattttataaaatatgacattttcttacttaagatgcagcttgtgtaatattattttgagctcttttgctctaatttggttaatatttacatgaaatttctacttccatcttgccactttcagtctttttttatcattagatctcaactgactcttgtaaaaaggcaagttgaatcttgatttttaaaattttttaataaacctttttatttaaagtatgtctcttgatttggagagataattatatatatttaaatagttttctgcaaaagaaaaacttattttattgttttattttattcttgtgtctttgtctctcattttctctttctgtcttttttttttatctttgtattgacatgctttcagtttcttattttcttttgtgtatctgtacagacattttctaagtggtaccttctgggattacataaaacctctaaaagatccaacaatatatttaaatgtggtaaaaaatcaacttcagtttcatacaaaaatttttcatcattacatctgccttctattttgttattgagtttgccaattatattttttatgtttgtatattcattaacatgtttataataatttctatagtttttatcttttaaattttagagaacaattaaaaatgttttctgcaccattatgataatgttaagaaattccatttttgtgtatgtgcatatctttcccagaaagttacatattttcatatgattatgggttgttttctttcaccatgttattttcagtggaggaaactcaccatctttgatatgtcaggcatatgcagtggcaatatacattctcaggatttggttattttggaagtgcttctttctatttggtagtaaaattgtggtgatgctattattctcacttgaaagctttttttaaattattattttaactttaacaatatcacagtttccttctcacttgcaaaaatttttttgataaattcacttgttatatcatgagactatgcttataaatgacacatcatttttatcttacagctcccaaaattctcttatctgtgatttttgaaattttgcttattatgtgtgtttgttataaatatcttggtgtgtacatttttaaagaaattttccaattatgttttgtatttttatatccacgatttttgttttttgctatttaaatgtttctggttgttattctcatttttctgatcttcagtagttgcctgtgttcctatttaacttactgaatattattcaatttattttattttatttatttattttattattattttctgagacagagtctgtctctgtcacctcaactggagtgcagtggtgcaggctcactgcaacctccatctcccaggttcaagcaattctcttgcctcagcctcctcagtaactgggattataggtgctcacaaccacacttggctatttttttatatttttagtagagataaggtttcaccatgttggccaggctaatcttgaacctctgacctcaaatgatccatccaccttggcctctcaaagtgctgggattacaggtgtgagccatcctgcccaccctattttattatatttttgagacaggcttcctctgttgtccaggctgtagtgcagaggtacaatcttcactcactgatggggccatgttgctctaatattttgtattcattgtaatctttgattgagctttggacattaacaaaaagctacctgttagaatctttaagatataactttattctggcatagtctgaaatcagttgtcatggctagagattttgggaatttctcaaacatgtttttaggatgtgtcttgtctaaaattttgtgtttattgtttagttaaattggcttattcatatttcttcttaataatcagtaatcacttgctagacttattccctgtttggggtagggcagtatctctgcttctgtgacatttatgtttagactcagcagactcaaactgttaatccaacttatatcgtcatttccttcagcattttatgtcatgggagacatttaccagtgtctagaaaagcccctaaaagccaaaaattaagatgtatgtgccaatatttttcctgctttttaaaagaaaccaggatttggcaatttacatttgtgtgtgtgtgtgtgtgtgagagagagagagagagagagagagtctcgccctgttacctatgctgtagttcagaggcatgatcttggtcactacaatatctgccattacagagtctcactctgtcacccaggctggagtgcagtggtatgatgtcagcttactgcaacctctgcctcctgggttcaagcaattctctgcctcagcctcctgagtagctgagattacaagttcctgcaccatgcctgtctagttttttgtgtttttagtagagatgggttctcaccatcttggccaggctgcctttgaactcctgacctcatgatcaacccatgtcagcctcccaaagtgctgagattactggtgtgagccatcacacctgaccagcaatttacttttaaaggcacaatgttatactggagagcaggaagagctctgttgggtataagtaacagactttttttttttcttctatgtggctctttgcattgtactcaccttgggcccttcatacacttaactcatttataaattttttacaaatgtattttgggcagtatgttttttttacatttatatgtccaggaagaaattacagcttgtgatattttgctacatcatcttgtttatgtagtttgtataattttataggttagatttgtaaagtatatttatctgagtctagcaagtgaagtagtgtgtttttatggtttctttcagttttgtgttctcattttaaccaagacctttggccagagcagagcataaaagattctttccaaaaactgatactgagaaggcataaaaaatgtggacatgataatttgcagttaaaaaaaggctgtgaaagtgtggataagtgtaaagtgcacaaaagaggttataatggacttaaccaatgtttgacaactacccaaagcaaaatgtttcaatgtgataaacatgggaaagtctttcatcaattttcaaatacaaacagacataagataagacatactggaaaaaacccttgcaaatttacagaatgtggcaaagcttttaaccggtcctcaacctttactacacataagaaaattcatactggagagaaaccctataaatgtatagaatgtggcaaagccttcaaccggtcctcacaccttactacacataagataattcatactggagagaaacggtacaaatgtgaagactgtggcaaagcctttaaccgctcctctaaccttactacacataagaaaattcatactggagagaaaccctacaaatgtgaagaatgtggcaaggcctttaagcgctcctctatccttactacacataagagaattcatactggagagaaaccctacaaatgtgaagaatgtggcaaagtttttaagtacctttcttccctttctacacataagataattcatactggagagaaaccctacaaatgtgaagaatgtggtaaagccttcaactggtcctcacaccttactacacataagagaattcatactggagagaaaccctacaaatgtgaagaatgtggcaaaggctttaagtactcctctacccttactaaacataaaataatccatactggagagaaaccctacaaatgtgaagaatgtggtgaagcctttaagtactcctgttcccttactgcacataagataattcatactggaaagaaaccttacaaatgtgaagaatgtggcaaagtgtttaagcactcctctcccctttctaaacataagagaattcatactggagagaaaccctacaaatgtgaagaatgtggcaaagccttcagtcggtcctctattcttactacacataagataattcacactggagagaaaccctacgaatgtgaagactgtggcaaagcctttaaccgctcctctaaccttactaaacacaagaaaattcatactggagagaagccttacaaatgtgaagaatgtggcaaggcctttaagtgctcctctattcttactacacataagagaattcatactgcagataaaccctacaaatgtgaagaatgtggcaaagactttaagtactcctctacccttactagacataagaaaattcatactggagggaaaccacacaagtgcaataaatgtggcaaagcctttatttcatcctcaaaccttagtagacatgagataattcatatgggagggaatccctacaaatgtgaaaatgtggcaaagccttagacactcctctacccttactagacataagataattcatactggagagaaaccctatgagtttgatgaatgtgggaaagactttaaccagctatcaacttttactaaatatgagaatttatggaacacaaacactacaaatataaagaatgtgacaaagcttttaggaagttctcaacccttattacacataattcatactggatagaaaccctacacctgtgaagaatgtggcatagcctataacaattttcaatcaattctttttttttttttttgagatgaagtttcatgcttgtcacccaagctggaatacaatgtgatgatctcggatcactgaaacctctgcctcccgggttcaagccattttcctgcctcagcttgtctagtagatgagattatggggggtggagccaagatggctgaataggtacagctcctgtctacagctcccagcctgagcgacgcagaagatgggtgatttctgcatttccgtctgatgtaccaggttcatctcactagggagtgccagacagtggctgcaggacagtgggtgcagtgcactgtgcatgagctgaagcagggcgaggcattgcctcactcacgaagcgcaaggagtcagggagttccctttcctagtcaaagaaaggggtgacagatggcacctggaaaattgggttactcccaccctaatactgcgcaattccaatgggcttaaaaaatggcacaccagattatatcctgcagctggctcagagggtcctatgcccatggagtctcactgattgctagcacagcagtctgagatcaaactgcaaggcagcagcgaggctgggggaggagcgcctgccattgcccaggcttgcttaggtaaagcagctgggaagctagaactgggtggagcccaccacagctcaaggaggcctgcctgcctctgtaggctccacctctggggtcagggcacagacaaaaagacagcagtaacctctgcagacttaaacgtccctgtctgacagctttgaagagagtagtggttctcccagcacgcagctggagatctgagaacgggcagactgcctcctcaagtgggtctctgacccccgagcagcctaactgggaggcacaccccagtaggggcagactgacacttcacacggctgggtactcctcatataaaacttccagaggaccgatcaggcagcagcatttgtggttcatgaaaatccgctgttctacagccactgatgctgatacccaggcaaacagcgtctggagtggacctctagcaaactccaacagacctgcagctgagggtcctgtctgttagaaggaaaactaacaaacagaaaggacatccacaccaaaaacccatctgtacatcaccatcatcaaagaccaaaagtagataaaaccacaaagatggggaaaaaacagagcagaaaaactggaaagtctaaaaagcagagcacctctcctcctccaaaggaacacagttccccaccagcaacagaacaaagctggatggagaatgactttgatgagttgagagaagaaggcttcagacgatcaaactactccgagctacaggaggaaattcaaaccaaaggcaaagaagttaaaaaattagacgaatgtataactagaataaccaatgcagagaaatgcttaaaggagctgatggagctgaaagccaaggatcaagaactacgtgaagaatgcagaagcctcaggagccaatgcgatcaactggaagaaagggtatcagtgatggaagatgaaatgaatgaaatgaagtgagaagggaagtttagagaaaaaaaattaaaaagaaacaaagtctccaagaaatatgggactatgtgaaaagaccaaatctacctctgattggtgtacctgaaagtgagggggagaatggaaccaacttggaaaacactctgcaggatattatccaggagaacttccccaatctagcaaggcaggccaacattcagattcaggaaatacagagaacgccacaaagatactccttgagaagagcaactccaagacacataattgtcagattcaccaaagttgaaatgaaggaaaaaatgttaagggcagccagagagaaaggtcgggttacccacaaagggaagcccatcagactcacagctgacctcttggcagaaactctataagccagaagagagtgggggccaatattcaacattcttaaagaaaagaattttcaacccagaatttcatatccagccaaactaagcttcataagtgaaggagaaataaaatactttacagacaagcaaatgctgagagattttgtcaccaccaggcctgccctaaaagagctcctgaaggaagcactaaacatggaaaggaacaactgataccagccgctgcaaaatcatgccaaaatgtaaagaccatcgagactaggaagaaactgcatgaactaacgagcaaaataaccagctaacatcataatgacagcatcaaattctcacataacaatattagctttaaatgtaaatgggctaaatgctccaattaaaagacacagacaggcaaattggataaatagtcaagacccatcagggtgctgtattcaggaaacccatctcacgtgcagagacacacataggctcaaaataaaaggatggaggaagatctacgaagcaaatggaaaacaaacaaaaaaagaggcaggggttgcaatcctagtctctgataaaacagaatttaaaccaacaaagatcaaaagagacaaggccattatataatggtaaatggatcaattcaacaagaagagataactatcctaaatatatatgcacccaatacaggagcacccagattcataaagcaagtcctgagtgacttacaaagagacttacactcccacacaataataatgggagacttaaacaccccactgtcaacattagatcaatgagacagaaagttaacaaggatatccaggaattgaacacagctctgcaccaagcggacctaatagacatctacagaactctccaccccaaattaacagaatatacatttttttcagcaccacaccacacctattccaaaattgaccacatagttggaagtaaagcactcctcagcaaatgtaaaggaacaaaaattataacaaactgtctctcagaccacagtgcaatcaaactagaactcaggattaagaaactcactcaaaaccgctcaactacttggaaactgaacaacctgctcctgaatgactactgggtacataacgaaatgaaggcaggaataaagatgttctttgaaacccatgagaacaaagacacaacataccagaatctctgggacacattcaaagcagtgtgtagagggaaatttatagcactaaatgcccacaagagaaagcaggaaagatccaaaattaacaccctaacatcacaattaaaagaactagaattgcaagagcaaacacagtcaaaaactagcagaaggcaagaaataactaaaatcagcagaactcaaggaaatagagacacaaaaaaaccttcaaaaaattaatgtatccaggagctggttttttgaaaggatcaacaaaattgatagaccgctagcaagactaatgaagaaaagagagaagaatcaaatagatgcaataaaaaatgataaagggaatatcatcactgatcccacagaaatacaaactaccatcagagaatactacaaacacctctatgcaaataaactagaaaatctagaagaaatggataaattcctcaacacgtacaccctcccaagactaaaccaggaagaagttgaatctctgaatagaccaataacagcctctggggttgaggtgataatcaatagcttaccaaccaaaaagagtccaggaccagatggattcacagccgaattctaccagaggtacaaggaggagctggtactattccttctgaaactattccaatcaatgggaaaagagggaatcctccctaactcattttatgaggccagcatcttcctgttaccaaagctgggcagagacaaaaccaaaaaagagaattttagaccaatatccttgatgaacattgatgtgaaaatcctcaataaaatactggcaaaccgaatccagcagcacatcaaaaagcttatccaccatgatcaagtgggcttcatccctgggatgcaaggctggttcaacatacgcaaatcaataaatgtaatccagcatataaacagaaccaaagacagaaaccacatgattatctcaatagatgcagaaaaggcctttgacaaaattcaacaacacttcgtgctaaaaactctcaataaattaggtattgatggaatgtatctcaaaataataagaactatgacaagcccacagccaatatcatactgaatgggcaaaaactggaagcattccctttgaaaactggcacaagacaggatgccctctctcaccactcctattcaacatattgttggaagttctggccagggcaatgaggcaggagaagaaaataaagggtattcaattaggaaaagaggaagtcaaattgtccctgtttgcagatgacatgattgtatatctagaaaaccccattgtctcagcccaaaatctccttaagctgataggcaacttcagcaaagtctcaggatacaaaatcaatgtacaaaaatcacaaacattcttatacaccaacaacagacaaacagagagccaagtcatgagtgaactcccattcacaattgcttcaaagagaataaaatacctaggaatccaacttacaagggacatgaaggacctcttcaaggagaactacaaaccactgcttaacgaaataaaagaggatgcaaagaaatggaagagcattccatgctcatgggtaggaagaatcaatatcatgaaaatggcccatactgcccaaggtaatttatagattcaatgccatccccatcaagctaccaatgactttcttcacagaattgaaaaacactactttaaagttcatatggaaccaaaaaagagcccacattgccaagtcaatcctaagccaaatgaataaagccggaggcatcacgctacctgacttcaaactatgctacaaggctacataaccaaaatagcatggtactggtaccaaaacagagatatagatcaatagaacagaacagagccctcagaaataatgccacatatctacaactatctgacctttgacaaacctgacaaaaacaagcaatggggaaaggattccctatttaataaatggtgctgggaaaactgtctagccataagtagaaagctgaaactggatcccttccttacaccttatacaaaaattaattcaagatggattaaagacttacatgttagacctaaaaccataaaaaccctagaagaaaacctaggcaataccattcaggacataggcatgggcaaggacttcatgtctaaaacaccaaaagcaatggcaacaaaagccaaaattgacaaatgggatctaattaaactaaagaccttctgcacagcaaaagaaactaccatcagagtcaacaggcaacctacaaaatgggagaaaattttcgcaacctactcatctgacaaagggctaatatccagaatctacaatgaactcaaacaaatttacaggaacaaacaaccccatcaaaaagtcggcaaaggacatgaacagacacttctcaaaagaagacatttatgcagccaaaaaacacatgaaaaaattctcaccatcactggccatcagagaaatgcaaatcaaaaccacaatgagataccatctcacaccagttagaatggcaatcattaaaaagtcatgaaacaacaggtgctggagaggatgtggagaaataggaacacttttacactgttggtgggactgtaaactagttcaaccattgtggaagtcagtgtggcgattcctcagggagctagaactagaaataccatttgacccagccatcccattactgggtatatacccaaaggactataaatcatgctgctataaagacacatgcacacgtatgtttattgcagcactattcacaatagcaaagacttggaaccaagccaaatgtccaacaacgatagactggattaagaaaatgtggcacatatacaccatggaatactatgcagccataaaaatgatgagttcatgtcctttgtagggacatggatgaaactggatatcatcattctcagcaaactatcgcaaggacagaaaaccaaacactgcatgttctcactcataggtggaaattgcacattgagaacacatggacacaggaaggggaacatcacactctggggactgttgtgggttggggggagggggaagggatagcattaggagatatacctaatgctaaatgatgagttaatgggtgcagtacaccaacatggcacatgtatacatatgtaacaaacctgcacattgtgcacatgtaccctaaaacttaaagtacaataataataaaataaaaaaattaaaaaagattacaagtgcctaccaccatgcccagctaattttcatatttttagtagagatgcaattttatcatgtttttcagggtggtctcaaactcctgacctcaggcgatccacctgctttggcctcctaaagtgctggaattacaggcatgaaccatgatgcctggccaccatttcttaattcttaagagatttggtgataattcctgccgaagaagaactctacaaacctaaaaaacatgtgacagtgcttttaccaacacctccaaattctctatgtataacaataattattgtggtgtgaaaccctagaattatatataatgtgacatagcctttatgtggttgccacacttgattgtaggtaagactgcaaaactcctactgtcatactggcaaaactcctacaagtttgaagaatgtggcaaaacatttaatcagttcttaccccttatttcacaggaaagctattatccttgagaaaaattgtacaaatataaggaatatggaaaaaccattaattcctactcacatcttaacataaaaaggttccttttaataaaagcattaaaagtgcaattactgtcaaaaaaatctttcagaatctataagcctttaaaatgaagaaaagtatttattttgaagacaactattacaactataaagggggttatagcgcatttacttgttgcacacatttgtaccagaggaaaacagtgaagcaattgctcaagctttgttcaacatcagggaatttatgttggagattagtcctgcaaatgtaataagtttagaaacactttttttttttcagaaacaacagcttagaaaacaccagagagtttatactaaagtataattttgcagatgcagtaaatataaaaacaattcaaaatagaatgtatataaatgtcagaatttacagtagaataactaaggcactgacacttaagacattacactaaatcagagtgttgagtataaaaactaatccacaactacagtttttagataaatgatttgtatgtaactttaaaaagatttttggaagcattgtaattacattgaaagtacacttgtttccttgaataaaattttttgaaaactgaataatgatataatacagctttcaaattacttcatgctgttaatttattcctgttttattcacatgtgaaagcatgtgatcaattgctgctgcattagagatattagatatttttaaaaattatttggatattatgaccttttctataaaagaataaggacattaaaatgtaagatgcataatgaaaatataagtggagaggttctttgtagtaaacctctattaagtataaggtaaatgttcagagcaatacttttctacattatagtgtcacaaggaaataattatagttaaaagtatattaaaataaaatagtatattattttactaattgtacttttatgtaatgaaatacagtacatttaaaaattgctagggctgggctcaatggcgcatgcctgtaatcccagcacttggggaggtcgaggtgggtggaacacctgaggtcaggagttcgagaccagcctgaccaacatggagaaaccccatctctactaaaaatacaaaaaatacaaaaaatacttaggaggctgaggcaggagaattgcttgaataagggaggcagaggttgtggtgagccaagatcttgccattgcactccaccctggacaaaaagaaaaaaactgcctccaccccccccaaaaaagttagattatgtgtgaacttaattttattattttttaaccatgttaagactactgtgcatttaatgaagcattattatgccactaactttaaacgatcctaccttactcaagggtgaagctacaagatggtaacaatacacaatttggcatatagtggaataacatttctagtaatcactttgcccgtggctttaaactgcaaatgagttaaagaatattgttcccacagattaaatttgtactctattttcttcttggaatttgttatttgtatttgtgcgtatatagtatgtgtatgtatttatgccttatatggcatcttttgactcaggcctacaatatgcagtaattacattagggtaaataaggtgtccgtcacctctagcatttatcctttgtattaccaaaagtgtaattatatgcttttgttcattttaaaatgtacaattaaattgttattgactacaggatttttttatggttataataattatacaaaaatacaaataaaatatgtccaggtgcagtggctcacgcctgtaattccagcactttgggaggccaaggcaggtggaatgcttgaggctaggggttcaagaccagcctggccaacatggtgaaaccccttctctactaaaaatacaaaaattgaccaggcatcttggtgcacacctggaggctgaggcaggagaattgtttgaacccgggaggtggaggttgcagtgagccaaggtcgcaccactacactccagcatagatgacagagtgagacttcatttcaaaaaaaaaagaaatagaaataaagtccatacatttctgagtcctgaaagtttattaataaatatttgttacatagctgtctttgaacatgtggtctctctgcctgcaagcatatagacttttagttttaatttacatagggttaaatatactcatattactctgaagataaaccttaggtgtatgaaaattatgaagcgagtgtttttgtgagtatgagtttgtacatattttcagaaggaaagagcaattattgcaacaaaacaaatcattttaattagatgattaacaaaactaaacaccttgaaaatgctaaaagcaaatctatactttctggtttgtattcaatttattagtgtaaaatgttatggcttatgattcggattctccccggaatctgcttattaaagcacaggcaactttgtctccagaaccaacactcttgaatacaacaataaaacccctcttcaaacaaacaaaaaaatcattttaacacctattttaatgaacattcaaccagaattgaataattgaatatatttttattgttctatgtgtgtgtgaacatataaaatggtgcataaaggaaaaatgagccagaaaaaaatgttagttaagatttgtagtgaataaaactggaaagtagttaattattatatccagttgatatctttgtttatgtagataacaaaagcagcagaaagacttttttttttctttttcaagatggagtcttgctctgtcacccaggctggagtgcagtggcgtgatagcccactgtaacctccacctcctgagttcaagcaattcttgtgcctcagccattttagtagctgggattacaggtgtgtgctaccacgcccgactaattttcatatttttagaagagacagggtttcatcatgttggccagactggtctcaaacagctgacctcatgatctgcctgcctcagcctcccacagtgctgatattacaggtatgagccactgtgacaggcaaaagactattttaaaagtttatttatgtgggtagacaacgttctaagataataccctgaattcccagtctgttacacaccagctgtgtaatactttcttcttgagtgtagaaacgtgtgactgtggtaggaaatcactcatgaaattaggttactcgtgttgcctttgtgtttatcaaaatggagattatcctgcttgtgctaaacttaatcagatgtggttttgagagaaagagacacgtcatagaaaaacacccctgctggcctgaaagtaagtgacttcttggtggaacatgttgtaagctgcttatggtggccacataacaggaaacatgtttgtatattgtcatcattcctgcctcctgcatgttgatttcagtaaggagaataagaggatcttatggcagagggtaaaaaagggactttcattcatgcaagaaataatcacctctcatctgggatagcttaagagaaacaggagaccacaacaggaccacattaatggtaggaaaagggtaccctgagtaaaagtgttcactggcatcatagaacaatatttagtaagctgtagtgaatgatcagcctctgggatactgatagtttaccaacaatgctgaactcattctgttttaatcagcatgtctgcaccattctggtgacccagttttatagtattcattacagaaataccatgaagaccagtgggtaatgtcctagaattgtacttatttcaaaaagcgtacctaattgttttcacatttcaaaaaccttaaaagcaatgaatttataattaacttctaactatagaggattctactatactgtaatacaagattaaactgtaaacaccttaatatgaatattttttgaatgtatgattagttagtagacagtttcttttagagtcacaggacaaaataacaactagagaaaacatttgaaatgggataaaattaaccaaaaccacatcttttcaatggcttggctaaactaaacaccttgaatattgtcatcttttcaatggcttggcgtaattgccatacttacggaaatggccagatgactaatgagaaacaggaagattttggctttgctcaatgattgtttttgaccttttgaaatctaaaatcctggctaaactattcaaagggaatattttataggtggcttcccagggtttccaagtaaatgaaggatggattctctctctgtcacccaggctgcagtgcaatggtgtgttctcatttcactgcaaactctgcctccctggttcaagcgattctcctgcctcagcctcccgagtagctgggataacaggcaaccaccattatgcccggataatttttgtatctttagtagagatgggatttcaccttgttagccaggctcatcttgaacagctgacctcagagtgctgtgactgcaggtatgagccactgtgcccggccagaagaattttgataggcaggaaaatgcacattatatacacacattgctctactctgatttacttcaacactgaaaaattgaagattgtaaatgtagtctcaatttagagtgaattaacaaaagatttgtttttcaaaaaagcaaatggataaaattaatgggtaacagatgccattagctgctaaaaaatagtatgactaaatttagtaagtatctagctatgcaaataacagcccaattaaattaagaccctaataggtgcatgtggaaagcattgatgtgcagtgtggtgcacctccactcagcattttcttctacctttttacagagataccaattcttcctcagttactcagggtccatactgggttagaaatgcttgttctctggtgccataaggaaatagcactcgaacattaattttcttagcaaggccatttttactttttgcggaaagtgtgcactcttcagcagttttgccatcaaagtacatcaaacaaaggagacaaggtcatttataacctgacgcatcctttctactgctgtgtctagttttcattggctgaaacaagacctcaaattctgtatttccccccattgtttagcgacttagaactttttaaaagaggcaaaggcagaggagaatgaaggaaggaggaagtaacttgtggaatgctgagaaaggtaaaaacaccaaataaggaagagtaacaggctatgacctaatgcttgcttggactagtataagcatgccagggcaaatatttaggctaaattgtgggagctaagaagaaagtacattgatttttttattatggctggcagatatttaagaatgttagcacaggactttgaataaattttgcttctaagagaagttactgtttattcctaattagatggggaggaaagtctttgaagaggaacctctactttactttttgcacttggaacagagagtgctgtgttcagagtgattaccgaaaacatggctaatacacatcttccatatgataataaaatgttataaatcttactctgcctcagaaaagcttttactaaaagattatctatggtaatcaatttgagttcatggaaaatttcaatattccacataattcagacagttaaatgtcaatgaaatctcaaaacatttgaataagataaagtcttcttagtgaagaattttatattaccggtagttagaaaaaaaagaaaaccaggctgaatgcggtggctcatgcctgtaatctcagcactttgggaggctgaggcaggtggatcacctatggtctagagctcgagaccagcctgactaacatggtgagacccccatctctactaaaaatacaaaaaattagctgggcatggtggcaggtgcctgtaatcccagctactggggaggctgaggtagaagaattgtgggaaactcggggacagaggttacagtgagccaagatcatgccattgccctccagcctgggcaacaagagcaagactccgtctcaaaaataaaataaaataaaaaccagtaccttaagccaaataacattgtttgacatgggagtagcaaccaaacaagtgctattcatgatttcataataactttttttttttgagacagtctcactaggtcacccaggttggagtgccgtgacatgatcttggctccctgcaacctctaactttctggtttacatgattctcctgcctcagcctccctagtagctgggagtacaggtgcccaccaccatgcccagctaatttattttttttttaagaggagtcactctgtcatcttggctggagtgcagtggcacaatcatggctcactgcaaccttggcctccaggttccagcgattctcctgcctcagcctcttaagaagctgggattacaggcacctgccaccacgcccagctaattttttatatttttagtagagaccagatttcaccatgttgcccaggctggtctcaaactgctgacctcaagcaatccactgccctccacctcccaaactgctgggattacaggcatgagccattgtgctcagcaatttctgtacttttagaagagacagggtttcaccatattggccaggctggtctcaaacttctgacgttgtgatccacccacctcggcctctcaaagtactgggaatacaggcatgaaccaccatgctcggcctgatcattgttaaagtagcaatagcaccttgtgctttcctaggacttgctggcctgtttttcactgatataaagtgaagaaagcattcaaatattgctgagaagtggctgtcctcccagaaaatagctattctcggctgtaccaacattgactaatagtaagaggaagtgaagtggataaaaggcaaatgtgtcttctctgtatcttttttcaaccattggctgaagaacaggagaatgcagaaaattaaaaaaaaaaaatccctgaaagatcatgaagaagctctctttatcagacaaaaaacctcttaggggattttttttgtttcattattgtactgtctgcttctatgagtttaaatttttttttacactttacatagaaataggattatatgagtcaggcacagtggctcatgcctgtaatcccaacactttgagaggccgaggtgggtggatcacttgaggtcaggagtttgaaactagcctggccaacataggaaaactctgtctctacagaaaatataaaaatttgctgggtatggtggcaagtgcctgtaatcccaggtactgaggaagctgaggcaggagaatctcttgaacctggaggcagatgttgcagtgagtggagatggtgccactgcactccagcctgggtgacaagagcaaaactccacctcaaaaaaaaaaaaaaaaggattatgttttctgtttttttccgtgttgacttattttacttagtataatgtctttcaggttcatgaatgttgttgcaaataacaagaccttatttttaagggctgaatagcatttcattgtgtacacataccatattttctttttccattcacctattgatggacacttaggttgatttcataccttagctattgtgagtaatccacttccttccttctattttgattttgtttttgttttgctttgtttgagatggagtctcattctgtcgcccatgctggagtgcagtggcgtgatctctgctcactgcaaactctgcctcccaggttcagtgatactcatgcctaagcctcctgagtagctgaggttacaggtgtaagccaccacaccaggctaatttttgtaattttagtagaggcaggctttcaccatgttcaccaggctgcctttcatttgtttgtatatttctttctcctttcccgtctttatctctagaagtattttaattttaatatataaattatgactgttaaccttcatttctctgtttttgcatactattatggctgattaaaagataagttttttgaaatttcctggataaagtttattacttcattattaagataacttgagacaatatggaaatgaaaatcaacatttgttagtaaaacagaaattagctactggtagtcatttaatctctcacccaacatgaacgctacgtctttgtgtcatctctcccagttgtatgtaagaggctactgagcaaactggtcagcataaaattttgtgaagtttaacatatatgttctgaaaattaagttgatccattaccagaaaagtaggttttctgatgtgtataattttactctatttaaattcttcagaaaaatgaaactgacattatgtaaaagttttttttggaaattaaaaatgcttaagaaatatttatagaaactaaaagtaaaaatagttttagattcctagagaacatctttaaaatacttcaagttatcttctgacactatatatatataaaatatatataatatataaatatatataatatataataaatataatatataaaaataatatataatatataatgtataaaatatatatttacattatatattatatataatatgtaatgtataaaatatatatttacattatatattatatataatatgtaatatttatatgtttatatatttaaatatataattatatttaaattatatatttaaatatataattatatttaaattatatgtttaaatatataattatgtttaaattatgtttaaatatataattatgtttaaattatatgtttaaatatacaattatgtttaaattatatgtttaaatatacagttatgtttaaattatatatttaaatacacagttatgtttaaattatatatttaaatatacagttatgtttaaattatatatttaaatatacagttatgtttaaattatatatttaaatatacagttatgtttaaattatatatttaaatatacagttatgtttaaattatatatttaaatatacagttatgtttaaattatatatttaaatatacagttatgtttaaattatattttaaatatacagttatgtttaaattatattttaaatatacagttatatttaaattatatatttaaatatataatttaaatataaaattatatttaaaatataattatatttatatactacataaatatatgatatatcatatataaatatatataatatcatatatgatatatatctcatatatgtgagatatatgatatatatctcacatatgagatatttatgatatatctcatatatatgagatatttgatatatctcatatatatgagatatttgatatatctcatatatatgagatatatatcatatatgatatatattatatactatatatcatatatgatatatatttatatattatatataatatatagaaatatataatatataatatatatcatatatatgtaaatatatatttaatatatatgtatatttatatatgaatatatattttgtatatgtaaatatatattatatataatatatatttttatataatatataatatattatatatgtttttatataatatataatatattatatatatttttttctttttttgagacaaagtttcactcttgcccaggctggagtgcaatggcacaatctcgcctcactgcaacctccaccttccgggttcaagtgattctcctgcctcagccttgccagtacctgggcttacaggcgcccaccaccacacctggctaatttttacagttttactatagatggggtttcatcatgttggccaggctggtctcgaactcctgacatcaagtaatccctctgccttggccgcccaaagtactgggattacaggcatgagctgctggctgggtcaagtgttgaacttttctgaataaattatctcagctcagataatttaagtcagccaattagcttacctctggggattccaagcagcccattagcacatcccaggagaatccaatcagcaaattagctcagcccagctgattagcccaggtaatttttaagagccagctaacttactccaggtgatattaatcagccagttatctcagctgatgtgaatcttataagccaattagtttagcacaggtgattttaaaccaccgcgtcactcagcccaggtgatttcaatcagtgaatcagcttaacccaggtgatttctatcagccaattaatcaatccaggtgaattcaattagctaattagctcagtccaggtgatcccaatcagccaattatctagcagctgccaattcattaaggcatgcccaaaatggtaaatgtaaatagcccaggcacaccaagaagaaatgcagggccctatatgctaagctggacagtatgtaccatacagctttactgtcagcttatttacaagacctgaaacctgaagctgaaggtttttgtttatataaaccacattgtatggctatgttttattctgttatgctattgaaaaaaacagaaggcaattaattctacatctgcatccttagtatatgctctatattttaaaaagtgggaaaatattttatgtatacattatttacatatacacattcatataagtttgcgtttatgtatctaccaggtgtgtacatatattcatatatatacctaagtatatataaatatatatataatatctgaagctgtaacaatctttgtatttatattcatacagaataaagatgttgactgtggaagtattgataggtattgctacaaacagtaatacaaaacctttcatacatgcataaaatattttccctgtagaatactatttctagaatagtacagaaatagaggaatgctctgatatacatcctgctgcacttaatatattcaaaggaagcactgaactttgttgtgcacttctggatgatacaaattttctaaggccattggagttatttactgccatatcagggttgacttttcttttattgttgtacgtaaggtcagagatgaaccagccccagtccaaaggttctaacctaaatatgagaatacttactctttctctttagaactttcatcaagacaagaactgtgtgtattcccaagagtgtgtgatgtaaaatcacactcttgtctttttgtctttgtggcagaagttgggtatttatggtaagaaaatattagtctaggtctctttttagaagacagatggtgatcatggaagcaaatataatggtacatggtacttggccacatttcaaatgggtgatagtgaacattcgctgaagtgtcacaggtggctctatttgccaggtcaaatctttgtgaggaaggctcagcccactggtgtcaagcatttctggcagtttccagaaagatgaaaagaagctcaccgggctggtttaatgagaccagaattaaaaacacccaggagccacattattaaacacatttttacatttatttaaaaaaatgtggtgtatggcttggtttgaataaatcttcactgagctcagtagctgattgaatttatctaacctgttcggaaagaaaatggaaataacctctgatcaagtttattttataggcttctttctttacatacagatataaaataggtggctcgttaaacatatacacacaaaatgagccacatggttatgtctatgtaatgtttatttctgcatacgactctcaaaaaaaagccacagaaaaaaagtaggtcagaagacatctccatatgctacccctgaagccaagatcaattaaataagtaaatgagcagaaaccgggtgattgcaatcagccaatttgcacagccttggtgatttcaaccagccaaggagctcagtccaggtggatccaatcatccaattatctaaatggtgactgtgactttgtcaagacaggcgccaaatggtgcatgtgaacggaacatgtaccaaatgcagggcgctgaaatactgtcctggacagatgtgttacatgactttattttcagcttatttctgtggacttgcccttgaagatagagctttgttgatatgttccattctgaaatgttatttagctaaagaaggaaaaattgattctacattagcgtctttagagcatgctaaaaggttaaaaatatctcttggggaatatgttttgtatacataaatatttagatagaaatatttatataattctctatgtgggtttttgtcttcctatgtatatatgtagatgtgtcaatctttgtattgatatgaaacgttgtgaatagtgagataaaaagtaacttccagttggatgctgtggctcacacctgtaagcccagcactttgagaggctgaggtgggtggatcacctgaggtcagaagttcaagaatagcctggccaacatggtgaaaccttatctctactaaaaccaaatctacgtctgattgatgtacttgaaagtgatggggagaatggaaccaagctggaaaacactctgcaggatattatacaggctcaaaataaagggatggaggaagatctaccaagcaaatggaaaacaaaaaaaaggcaggggttgcaattctagtctctgataaaacagactttaaaccaacaaagatcaaaagagacaaagaaggccattacataatagtaaagggatcaattcaacaagaagagctaactatcctaaatatatatgcacccaatacaggagtacccagattcataaagcaagcgttagagacctacaaagagacttagactcccacacaataataatgggagactttaacaccccactgtcaacattagacagatcaacgagacagaaagttaacaaggatatccaggaattcaactcagctctgcaccaagcagacctaatagacatctacagaactctccaccccaaatcaacagaatatacattcttcttagcaccacactgcagttattccaaaattgaacacatagttggaagtaaagcactcctcagcaaatgtaaaagaacagaaattataacaaactgtctctcagaccacagtgcaatcaaactagaactcaggattaagaaactcactcaaaaccgctcaactacatggaaactgaacaacctgctcctgaatgactactgggtacataacaaaacaaaggcagaaataaagatgttctttgaaaccaatgagaacaaagacagaacatgccagaatctctgggacacattcaaagcagtgtgtagagggaaatttatagcactaaatgcccacaagagaaagcaggaaagatctaaaattgacacgctaacaccacaattaaaagaactagagaagcaagagcaaacacattcaaaagctagcagaaggcaagaaataactaagatcagaacagaactgaaggaaatagagacacaaaaaacacttcaaaaaaatcaatgaatccaggaggtggttttttgaaaagaccaacaaaattgatagaccactagcaagactaataaagaagaaaacagaagaatcaaatagacgcaataaaaaatgataaaggggatatcaccaccaatcccacaggaatataaactaccatcagagaatactacaaacacctctacgcaaataaacgagagaatatataagaaatggataaattcctcaacacatacaccctcccaagactaaaccgggaagaagttgaatctctgaatagaccagtaacagcctcgggattgaggtgataattaatagcttaccaatcaaaaaaagtccaggaccagatggattcacagctgaattctatcagaggtacaaggaggagctggtactattccttctgaaactcttccaatcaatagaaaaagagggaatcctccctaactcattttatgaggccagcatcaatatgataccaaaacctggcagagacacaacaaaaagagagaattttagaccaatatccctgatgaacatcgatgcaaaaatcctcaataaaatactggcaaactgaatccagcagcacatcaaaaagcttatccaccatgatcaagtgggcttcatccctgggatgcaaggctggttcaacatacacaaatcaataaacataatccagcatataaacagaaccagtaacaaacaccatatgttatctcaataggtgcagaaaaggcctttgacaaaattcaacaaccttcatgctgaaaactcttaataaattaggtattgatgggacatatctcaaaataataagagctatctatgacaaagccacaaccaatatcatactgaatgggcaaaaactggaagcattccctttgaaaactggcacaagacagggttgccctctctcaccactcctattcaacatagtgttggaagttctggccagggcaatcaggcaggagaaggaaataaagggtattcaattaggaaaagaggaagtcaaattgtacctgtttgcagatgacatgattgtatatctagaaaaatcccattgtctcagcccaaaatctccttaagctgataggcaacttcagcaaagtctcaggatacaaaatcaatgtgcaaaaatcacaagtattcttatacacaaataacagacaaacagagagccaagtcatgagtgaactcccattcacaattgcttcaaagagaataaaatacctaggaatccaacttacaagggacgtgaaggacctcttcaaggagaactacaaaccactgctcaacgaaataaaagaggatacaaacaaatggaagaacattccatactcatgggtaggaagaatcaatatcatgaaaatggccatgctgcccaaggtaatttatagattcaatgccatccccatcaagctaccaatgactttcttcacagaattggaaaaaattactttaaagttcatatggaatcaaaaaagagcctgcattgccaagtcaatcctaagcaaaaagaacaaagctggaggcatcacactacctgacttcaaactatcctacagtgctacagtaaccaaaacagcatggtactggtaccaaaacagagatatagaccaacggaacagaacagagccctcagaaataatgccccatatctacaagaatctgatcttttgcaaacctgacaaaaacaagaaatggggaaatgattccctatttaataactggtgctgggaaaactgtctagccatatgcagaaagctgaaactggatcccttccttacaccttatataaaaattaattcaatatggattaaagacttaaatgttagacctagaaccataaaaaccctagaagaaaacctaggcattaccactcaggacataggcatgggcaaggacctcatgtctcaaacaccaaaagtaatggcaacagaagccaaaattgacaaatgggatctaattaaactaaagaccttctgcacagcaaaagaaactaccatcagagtgaacaggcaacctacaaaatgggagaaaattttcgcaacctactcatctgacaaagggctaatatccagaatctacaatgaactcaaacaaatttacaagaaaaaaacaaacaaccccatcaaaaagtgggtgaaggacatgaacagacacttctcaaaagaagacatttatgcagccaaaaaacacatgaaaaaattctcaccatcactggccatcagagaaatgcaaatcaaaaccacaatgagataccatctcacaccagttagaatggcaatcattaaaaagtcatgaaacaacaggtgctggagaggatgtggagaaacaggaacactttcacactgttggtgggactgtaaactagttcaaccattgtggaagtcagtgtggcgattcctcagggatctagaactagaaataccatttgacccagccatcccattactgggtatatacccaaaggactataaatcatgctgctataaagacacatgcacacgtatgtttattgtggcattattcacaatagcaaagacttggaaccaagccaaatgtccaacaatgatagactggattaagaaaatgtggcacatatacaccatgaaatattatgcagctataaaaaatgatgagttcatgtcctttgtagggacatggatgagattggaaatcatcattctcagtaaactattgcaagaacaaaaaaaccaaacaccacatattctcactcataggtgggaattgaacaatgagaacacatggacacaggaaggggaacatcacactctggggactgttgtggggtggggggaggggggagggatagcattggaagatatacctaatgctagatgacgagttagtgggtgctgcgcaccagcatgtcacatgtatagatatgtaactaacctgcacattgtgcacatgtaccctaaaacttaaagtataataataattaattaattaattaattaaattaaatttaagaaagtaaaaaaggaaatgagggaaatatactactaaaaacacataaaacaataacaatataactggcaataacaacttcatttctttaagcaatcattttaaatataaattaattaaactatttaataaaatgaaatgtaatcgtaggactttgtaaggccaaggtaggctgatcacttgatcccaggagttcaagagcagaatgggcagtatggcaaaactctgtctcagcaaagaatacaaaaaaggtagctgggtgtgatggcacatacttgtaatccagctacttgagaggctgaaatgagaggatcatctgagtttgggaggttcgggcagcagtgaacccagcaaatcaacctggttgacagagtgagaccctatctccaaaatacacgaggctgggtgtggtggctcaggcctgtaatcccaacacgttaagatgctgaggtaggccgcctggtctctactaaaaatagaaaaaaattagccaagcatggtggcaggttcctgtaatcccagctacttgggaggctgaggcaggaaaatcgcttgaacctgggaggcagaggttgcagtgagctgagattgcaccattgcacttgtccagtctgggcaacgagcgaaactccatctggaataaaaaagcaaagaatttataaataaatacaattatatgaagaaaaaatagaatgcctgattggtttttttataaagcaaacaatatgctccctacaagagactcattttagcattgattcaagtaggctgaaagtaatagaataaaaaaagtatattccatgaaaatagtaccacaattgagtgaggtggtcataattatattagacataatatgctttaagtcaagtactgccatgagacaatgactgatattatattatgataaagtgagttgatttagcaggaatctataactatttatctatctgcatatgtgtatataacatcagagctttaaaatatataaagcaaatattgacaaaagtgaagcaagacatacataacaacataataattgtagacatcaagaccccatttgcagtaataaatagaaaattaaggtaaaaataagaaacagaaaactaagacattatagactatattaactattttgcatatagaggaatacttgagagtgcataatttataaagaaaaaaggtttatttggctcacagtttggcagactgtataagtgtgtgccagcatctgcttctggtgaggatttcaggaagcttaaaatcatggtggaaggtaaagagtaactggacatattatatgataagagacagagcaagtgtgaggtgaaggtgccagattattttagtgaaccagttttcatttgaattaatagagtgtaaactttttggttaccaagaggttgtacgaagccattcatgagaaattttccccccgtgacaaaaacatgtcccaccaggtcccacaatcaacattgaggatttacattgcagcttgaagtttggagaacatggacgtccaaataatattatgaacgaactaggcttcacagacacatacaaaactctccagtgaaaaccaagataatacacaatattcctatttgcacctgatgcattctgttaggacacagcaagttttattaaatttaaaaatactaactgggtgcagtggctcttgcctataatcctaacactttgtgataccaaggtaagaggatccattggtgccaaatgtttgagactagcctggacaacattgtgagatcctaaaactacaaacaagcaaacaattatccagacatggtagtgcatgtctgtagtcctaactactcagaaaactgaagtgaaaggatctcttgagcccaggaggctgaggctatagtgagccaaaattatgccactgcaccgcagcctgggatgcaagatgttgtctcaaaacaacaacaaattacgttaagaagactaaaattatacattgcgtgttttctaacaaaaactgaatgaaactaggaattaaaagcaaaagtcaaactggcatattcaaaactatgtgaatatgaaacacactcttcaacatattcttgctctgtgtcaaaaaatgtcatttttcaaagatgtcaatccaacctacagttaaaagctacagaacataaacagtgtgatattgacacaaagattaacagatgaaagaacaaaatagagttcagaaatgaacccttctatatatgatcaaatgatcttccacaacgttgccatgagcacaaaacagagaaaaataatctcttcaaaaaatgatgttgaaaactgaatatcaaaactgataaaaaagttggattatttccttgaattaaaatatattttaaataaaatgcttggacataaaaaaactaacaaatcttttagaaaaactacggaaaaaagacatgacattggtcttggcatcattttcttagctacaaaattaaatgcatgagcagcaaatgaaataacagaaaagtttaactacactagacttcaaaatttctgcataccaaaaaacaattcaagagtaacaacatcccttagaaaacgggtgaaaacatttgcaaatcacatgtgaaagaagttaatattcaaaatatataaacaactctttaaacaataaaattgaataacttgatttagaaatggacaaaaaatttttcattagacaagtacacaaatgggaaaaagcatttgaaaggacacaaaaaattactaacttgtaaagaaatgaaaaaaaaaacaaaaaaacaaaaaaaaccactgacaaacaaaatcacctcacacccattaggaggaccactacaaatatttttaaaaacatcaaatctgttgacgatgcaataaaagtgaaacccatgttaattgttggtggaaaacaaagatgcagccattattttagaaagttacaaatgctcctcatttataagtctatatccaaaatatgtaacaaaggccaggtgcagtggctcaagcctgtaatcctagcaatttgggagtccaaggggggcagatcaactgagatcaggagtttgagaccaacctgatcccttctctactaaaaatacaaaaaattagctgggcatcatggtgggaacttgtaaccccagctacttgaaaggctgaagcagaagaattgcttgaaaccaggaggcagaggttgcagttagctgagatctcaccactgtcaacagcctaggcgacagagcaagactccatctgaaaaaaaaaaaaaaaagcaacacaggatatgggaggcatatttgaaaatccattttattgcagcagtattcacaaaagccaaagggccgaagcaataacccagatgtctcttgatttataaacatatcaaaaaatgtaacctatacatacaatagaatattattccaccttcaaaaaaatcttgttacattttaagatgaacattgagaatcttatgtcacctgaattaatctagtaacaaaattatggatactgtaccacttatgtgagatatcttaagtagtcaaaatcataaaaacagaaaatggaaggtttgtcaaaagctggagagagggtaaaatgagaagttgttacttaatgagtactgagttttagttttgcaagatgtaaagtttctagaagtcttttgcataacaatgtaaataaacttaacatgcctgaaatgaaaagcttttttttttttttttttgagacagggtcacccgagctggagtgtagtggcacaattcaatctcccatgtagctgggaccacagcttcacaccaccatacacggctatcattaattttttctttttatagagaggggtctccctatgtttcccaggctggtctcaaacttttgggctccagggatcctcctgtcttggcctcccaaaatcttgggattacagatgagagccacaaccatgcctggccctgaagtatacacatcaataaatttaagatggtaaatattatgttatgtgtttttaaaacaatgtttatagagaaaaactttaaaaaatccagaattataaatctttttggaaattaacttcaaatcacaaaagtgtttctctcacaaaaagaaatatatattaatcattaaacacatggtgaaaataaggctatctccatgactactcagacaagataaaattaccatcgaaaattagctgagagaatatgaaataagccataactaaaatttgggtcatatttataggttagcacacatacacatgtaatccggttgtgatagacatgcgcaatttatttcttagataaaactcatattgacttaaatatacaaacggaattgcaaattgtctaaaattataatacgtaagtataaccaatagacacaataaactgatgttgggaaacctacaccgaggctggactcggtggctcatgactataatcccagcactttgggaggctgaggcaggcgtatcacgaggtcaggagtttgagaccagcctggccaataaggtgaaacactgtctctaataataatacaaaaattagctgggcttggtggcgtgcctgtagtcccagctactcaagaggctgaggcagaagaatggcttaaactcggaaggcagaagttgctgtgagctgagactgtgccactgcactttagcctgggtgacggagagagactccctctcaaaaaaaaaaaaaaagtaataaataaatctacaccggagaaactcactaacatagaacttcaaacaataataagagaaatgtttgctcataaaatctggtatactacattgatgtatcatcaaacaaaatttgtcaggcagggtgtagtgattcatgcctataatctcagcactttgggaggccaagggggacagatcacctgaggtcaagagtttaagaccaccctggctaaagtggtaaaaccacatctctactaaaaatacaaaaattagctgggcatggtggcacatacctgtaataccagctacttgggaggctgaggcacaagaattgcttgaacccgggaggtgaatgttgtagtgagccaagatcacccgacggcaatccagcctgggtgagaaagtgtaattgcttctcaaaaaaaaaacaaaaaaaaaaaactatgtaactgcaatatttagctgttactatgtactcatcatatacaaatattttaaatcattggcatgcattgtgtggcagtaaaatttcagagaatatgcagtataattataaatagaagattctaaagagaaacaataaattagcattttaaagaaactagagttgctttttatgttttaaatatatgctattgttaaacaaaatgaaactgctgtaatccaactttaaaaggaaagaatagccttacgttgttaagtacagaaaaagatatatattttgcagaatatggttaggccctctcatatgtgaaacaaatattaagaaataaactatgttattatttagatatagcctgaaataagtagatgaaaatcctataattcctttttgcctgtatcaaacttaaacttatatgtaaatgttttagtaaatatggagtgcctattaattatctaatttacttgaggcataccatgcaaattctagcatattgtcctaaatatctgaatctaaaattacagaaaaatttgaaatagaaaatagaaagtaaaaatgtataaggagagtgacatcagtaagataaaaagattaaaagtgccctattttcatattcccttacagcaaaaaaagtcagccatccctgacaaaaatgcctttatgagagaacagggcattattgctcacatctataatgacagcttcatggtacattaggttggaaaactgcttcaggtgaggattttgaggccagcctgggttatgtagcaagatgtcatctcccaaataagtgcctctaagagagatgtgagatgcagggacgcagttgtgaaacgatgttaaagcttaagtttgagaaggattctattcggaaggcaggccctcattcatgtgggatactgcaggactcctgttttagctacagaccaggatagggttcacccaacttggttccactgagaattctaaacttactctgtaaccatcccaaactcctcccagccacagtctggcagaggtcctgctattccagatacctggaggaaggtgcccatttacatccatgcaggcaggcctgcagatctgggcctttactggggtcactgaggcagttcaatgactcagtttcagttacccgagccactgtttatggtcagttctccctatatagaaacccacacagttacctgaggaaatgctctctggtactcactgaaagccatactcatcaacatcctgatacaaggtccaccatatgcagaccgaactgcaaaaacttgccctagtgtttgccctatggagcaaagccctgaaggatattcagtctgtccaaaaatgaaatgggaattacaactacccaagcccctgtaacaagccaactaaaggtgaaccctagttcagacccagcagccttgtgaccaagctacaacccctcttcactacaaattcagagggcatctcatcaccctaagggcccaacaaaagatctttaccttctgaaatcagtttatgaaaatttaaagtggtgtttgctccatcaaattcagacacaaataccaaactatattctgtccattgtcaatgcttctactttaatgtagcactggaagtatgtggcagaagaattagtcaaagaaattttaaaaatccattaaaattgaggaaaaataaataaaaaattgctgcttgtagatcatataatcttatatttaaaaacccataaagagtacattcgaagctgtctaaactaatacatacactcagtaaattagcaaaatataaaactaacatacaagcatatgtacggttttatacacttaaactatctgataaaatagaggaagaaaaaaatcttatttactatagcattaaataataaatttctgagaaaaaaattaaccaaggaagtaaaaaatctttactaaaaaaatgaaaaaattagaaaagttataaataaattttaaaatattttatgtctatggattgaaagtataaatattattaaagtgccatattattcaaagtgatctatagattcaataaacttcccattaaaattgcaatggtatctttttgacagtaatgaaaaatacaattctgaaatttacatgaaactataataagctttgaattgccaaagcaatcttgatgaaaagaacagagcagaagtataagcaaaacttatacttttgaagtctatttcaagattatatagtaataaaaacagaatggactgtgcagaagactgagcaagaaaaattcaacagaaactactactctcacacatttcagacctatgcaaaaagagaactttgagaatagttttagtttctcaaaaaaaatcagatatttgtgtccccaaaacactggaaaagaagccagattatgcagcctcttatatgctgtgaagtggactttggctctcactgtgaacttgaagggagctcactgaaagaaaagaagaattcttaaagaatttaaaagcatatgacagaagtgtcactttgtgagagaaaaattaaaacaaaaacaaaaacagctgcccaggactatttcctttggaacacagcttcccaaaacacattttaaggactggctttctctttaaccttgggatctcttatctgtgccatctgttgcattcgttttcactcgcacccaccttggtgtttggcaatcatctcatgtctcttcatagttttttttcttattccagacaggtgatcaggtctggcttagagacaacaataactgttttattaaaaataaataacatgaatctttctcatattctccaattacaagctagtaatgtgctcagcagagaggatgtaatacaatattctggtaaattaataccaaaatactaacttataacagaaatttctaaatatttagaaaatactttcaaactgtaggtttctttttctttattttttaattttttttatttttttgagaccgagtttggctcttgttgcgcaggctgaagtgcaatggtgcgatctcggctcagtgaaacctctgcctcccgggttctaccaattatccagcctcagcctctggagtagctgggatttcacgtgtgtgccaccatgcctggctaattttgtatttttagtagagatggagtttctccatgttggtcgggctggtctcgaactcctgacctcaggtgatcttcctgcctcagcctcacaaagtgttgggattataggcgtgagccactgtgccaggtcctgcacgtaggtttttaaattttactacctgatactactgaatcaaaacttggtgctggcagttagattttcaggtgggagcaaccatattttatgccaaaatttcgggaattaccacaaatttagagtgaagaatacagctcaactcaggaatgtggaaagtttggattaagatgaaatatcttgaagaaattcttttctaaatgaaaaaattctgaagattttctgggaaaaaagcattctgaaactctttgatgcaaagaataaattactaaaaaacactccacaagaaaagataaataaaaccttcagggtatgttacgaattatgtattaaggttatcctcaccaagaaagacaaggtttctgtagttctctaacatcatatccctatataaatttcactgtgcagtatccagacaatgacactccttcagagagaattctatggccacatctctaaattgcaatggcccctgaaacacacacacacacacacacacacacacacacatatttttaccaagtggccgtgggcggagttgttattttgacttaaggtgaaattggaaagtaaagagaactggttcttacttataggactgactaaaattatccaataaaataattttcaacacagaaatatgctctaatgtattctttaactctgagaaagaggagcagcgtaagatccacaacatcattacatatatgatatttttctaggtaacgaagtataaaattaagggattgaacatgaacatgtacatttttgagggcaacatccacctactgggctcaagtgattctcctgcctcagcctcccgaattctgttactacaggcttgtaccaccatgcctggctcattttttttttttttttgaatttttagtacagatggggttgcaccatgttagccaggatggtctcaatctcctgacctcgtggtccaccagcctctcaaagtatcgggattacaggagtgtgccactgcatctggccacaagcattttcttaatcctgctctgcatagagctaatggaacacacagatggagcctcaacattacatgttttccatctttactaaggaccacagtttttcccaagagaaatcttgagtatccacaccttctcatgttcaacagccataaagggaacatttttaatattgcatattggaaacaactgctcagagtttcagagtaagtgagcactcaaatcgagaacgttgaagcaaggcaaatttacttctatacaaggctgcatctcacaggtggagaaatagcaagagcacaattggacaagggaggggaagggggtcttatcccttacaccgctagtccttagtgatgtgtctttctcctattggctagggttagaccgcacagtcttagctaattccaattagctattttaaagagagcaagggtggcgaggtgagtagtttcagcaggaaggatggtcacaaggcatttgactgggggtgactcagaatagagcaggtaactagggatgattcacagcaggtgactaggggtgactcagaacagattaggtgactggggatgagtaaggaccctaaatatgtgagttagaagggggttgcttactgaaactaggggcaaggagacataaagattgaggaatttaaacattaaaatggagaacaaagaacagggaagctgataatactgaaatattggttctttgaagaggacttcagaactcattgtacttaacgattttcctctcttggattttaaaggaagttaagctgaaacctttaaagagatatttactgtatcctacatttcagatcataaattcttgctgagaattctgcatggcatataagaagctacgacatagaaaatgtagagaaagttctggaatataggaaataaatatttttcggagacccttgactatcataagtattttaagaagaactcaaactgagaatagggggtggagccaagatggccgaataggaacagctccagtctacagctcccagcatgagcgacgcagaagacggatttctgtatttccaactgaggtaccgggttcatctcacaggggagtgctggacagtgggtgcagcacacactgtgtgagccaaagcagggcgaggcattgcctcacccaggaagcgcaaggggtcagggaattccctttcctagtcaaagaaaggggtgacagatggcacctggaacattgggtcactcccaccctaatactgtgcttttccaatgggcttcacaaacggcaggccaggagattatatcccacacctggcttggagggccctacacccacggagcctcactcattgctagcacagcagtctgagatcaaactgtaaggcggcagtgaggctgggggaggggtgcccgccattgctcaggcttgagtaggtaaacaaagcagcctggaagctcgaactgggtggagcccaccacagctcaaggaggcctgcctacctctgtaggctcaacctctgggggcaggtcacagacaaacaaaagacagcaataacttctgcagacttaaatgtccctgtgtcacagctttgaggagagtagtggttctcccagcacacagcttgagatctgagaatgggcaaactgcctcctcaagtgggtccctgacccctgagtagcctaactgggaggcaccccccagtagaggcagactgacacctcacatggccggatactcctctgagacaaaacttccagaggaatgatcaggcagcagcatttgtggttcaccaatatccactgttgtgcagccaccgctgctgacacccagccaaacagggtctggagtggacctccagtaaactccaacagacctgcatctgagggtcctgactgttagaaggaaaactaacaaacagaaaggacatccacaccaaaaacccatcggtacgtcaccatcatcaaagaccaaaggtagataaaaacacaaagatggggagaaaacagagcagaaaaaatggaaactctaaatatcagagcacctctcctcctccaaaggaacgcagctcctaaccagcaacagaacaaagctggatggagaatgactttgactaaatgggagaggaaggcttcagaagatcaaaccactccgagctaaaggaggaagtttgaacccatggcaaagaagttaagaactttgaaaaaaaattagatgaatggataactggaataatcaatgcagagaagtccttaaaggacctgatgaagctgaaaaccatagcatgagaactacgtgacgaaggcacaagcctcattaaccaatgcaatcaactggaagaaagggtatcagtgatggaagatgaaatgaatgaaatgaagcatgaagagaagttaagagaaaaaagaataaaaagaaatgaacaaagactacaagaaatatgggactatgtgaaaagaccaaatctacatctgattggtgtacctgaaagtgacggggagaatggaaacaagttggaaagcactctgcaggatattattcaggagaacttccccaacctagcaaggcaggccaacattcaaattcaggaaatacagagaacaccataaagacactccttgagaagagcaactccaagacacataactgtcagattcaccaaagttgaaatgaaggaaaaaatgttaagggcagccagagagaaaggtcaggttacccacaaagggaaacccatcagactaacagctgatctcttggcagaaactctacaggccagaagagagtgggggccaatgttcaacattcttaaagaaaagaattttcaacccagaatttcatatccagccaaattaaccttcataagtgaaggagaaataaaatactttacagacaagcaaatgctgagagattttgtcaccaccaggcctgccctaaaagatctcctgaaagaaacactaaacatggaaaggaacaactggtaccagccaatgcaaaaacatgccaaattgtaaagaccatcaagactgggaagaaactgcatcaactaacgagcaaaataactggctaacatcataatgacaggatcgaattcacacataacaatactaaccttaaatgtaaatgggctaaatactccatttaaaaggcacagactggcaaattggataaaaagtcaagacccatcagtgtgctgtattcaggaaacccatctcatgtgcagagacacacatagactcaaaataaagggatgtaggaagatctaccaagcaaatggacagcaaaaaaaggcgggggttgcaatcctagtttccgataaaacagatttaaaaccaacaaagatcaaaagagacaaagaaagccattacataatggtaaagggatcaattcaacaagaagagctaactatcctaaatatatatgcacccaatacaggagcacccagattcataaagcaaagtccttagtgacctataaagagacttagactcccacacaataataatgggagactttaacaccccactgtcaacattagacagatcaatgagacagaaagttaagaaggatatccaggaattcaactcagctctgcaccaagtggacctaatagacatctacggaactccccaccccacatcaatagaatacacattcttttcagcaccacaccacacctattccaaaattgaccatatagttggaagtaaagcactcctcagcaatgtaaaagaacagaaattataacaaactgtctctcagaccacagtgcaatcaaactagaactcaggattaagaaactcactcaaaactgcaaaactacatggaaactgaacaacctgctcctgaatgactactgggtaaataacgaaatgaaggcagaaataaagatgttctttgaaacccatgagaacaaagacataacatactagaatctctgggacacattcaaagcagtgtgtagagggaaatttatagcactaaatgcccacaagagaaagcaggaaagatctaaaattgacaccctaacatcacaattaaaagaactagagaagcaagagcaaacactttcaaaagctagcagaaggcaagaaatatctaagatcagagcagaactgaaggaaatagagacacaaaaaccccttcaaaaaattaatgaatccaggagctggttttttgaaaagatcaacaaaagtgatagaccactagcacgaccaataaagaagaaaagagagaaaaatcaaatagatgaaataaaaaatgataaaggggatatcaccaccaatcccatagaaatacaaaccaccatcagagaataccataaacacctctaagcaaataaactagaaaatctagaagaaatggataaattcctcaacacatacactctctcaagactaaaccaggaagaagttgaatctctgaatagaccaataacaggctctgaaattgaggcaataattaacagcttaccaaccaaaaaattccaggaccagatggattcacagccgaattctatgagaggtacaaggagaagctgataccattacatctaaaattattctaatcagtagaaaaagagggaatcctccctaactcattttgtgaggccagcatcatcctgataccaaagcctagcagagacacaacaaaaaaagagaattttagaccaatatccttgatgaacattgatgcaaaaatcctcaataaaatactggcaaaccgaatccagcaacacatcaaaaagcttatccaccatgatcaagtgggcttcatccctgggatgcaaggctggttcaacatatgaaaatcaataaatgtaatctagcacataaacagaaccaaagacaaaaaccacatgattatctcaatagatgcagaaaaggccttcaacaaaattcaacaacatttcatactaaaaactctcaataaattaggtattgatgggtcctatctcaaaataataagagttatctatgacaaacccacagccaatatcatactgaatgggcaaaaactggaagcattccctttgaaaactggcacaagacagggatgccctctctcaccactcctactcaacatagtgttggaagttctggccagggcaatgaggcaggagaagggaataaagggtattcaattaggaaaagaggaagtcaaattgtccctgtttgcagatgacatgattgtatatctagaaaaccccatcgtctcagcccaaaatctccttaagctgataagcaacttcagcgaagtctcaggatacaaaatcaatgtgcaaaaatcgcaagcatttttatacaccaataacagacaaacagccaaatcatgagtgaactcccattcacaattgcttcaaagagagtaaaatacctaggaatccaacttacaagggatgtgaaggacctcttcaaggagaactacaaaccactgctcaatgaaataaaagaggatacaaacaaatggaagaacgttccatgctcatgggtgggaagaaccaatatcatgaaaatggccatactgcccaaggtaatttatagattgaatgccatccccatcaagctaccaatgactttcttcacagaattggaaaaagctactttaaagttcatatggaaccaaaaaggagcccacatcgccaagtcaatcctaagccaaaagaacaaagctggaggcatcaccctacctgacttcaaactatactacaaggctacagtaatcaaaacagcattgtactggtaccaaaacagagatatacaccaatggaacagaacagagctctcagaaataatgccacatatctacaactatctgatctttgacaaacctgacaaaaacaagcaatggggaaaggattccctatttaataaatggtgctgggaaaactggctagccttatgtagaaagatgaaactggatcccttacttacaccttatacaaaaattaattcaagatggattaaagacttccatgttagaactaaaaccatgaaaaccctagaagaaaacctaggcaataccattcaagacataggcatgtgcagggacttcatgtctaaaacaccaaaagcaatggcaacaaaagccaaaattgacaaatgggatctaattaaactcaagagcttctgcacagcaaaagaaactaccgtcagagtgaacaggcaacctacagaatgggagaaaatttttgcaacctactcatctgacaaagggctaatatccaaaatctacaatgaactcaagcaaatttacaagaaaaaaacaaacaaccccatcaaaaagtgggtgaaggatatgaacaaacacttctcaaaagaagttatttatgcagccaaagaacatgaaaaaatgctcgtcatcactggccatcagagaaatgcaaatcaaaaccacaatgagataccatcacacaccagttagaatggcgatcattaaaaagtcaggaaacaacaggagttggagaggatgtggagaaacaaggaacacttttacactgttggtgggactgtaaactagttcaaccattgtggaagtcagtgtggcgattcctcagggatctagaactagaaataccatttgacccagcaatcccattactgggtatacacccaaaggactataaatcatgctgctataaagacacatgcacacatatgtttattgcagcactattcacaatagcaaagacttggaaccaagccaaatgtccaacaatgatagactggattaagaaaatgtggcacatatacaccatggaatactatgcagccataaaaaatgatgagttcatgtcctttgtagggacatggatgaagttggaaaccatcattctcagcaaactatcgcaaggacaaaaaaacaaacaccacatgttctcactcatagatgggaatttaacaatgagaacacatggacataggaaggggaacgtcacacaccgggacctattgtgtggtgggggtagggggtaaggatagcattaggagatatacctaatgctaaatgatgagttaatgggtgcagtgcaccagcatgtcacatgtgtacatatgtaacaaacatgcacgttgtgcacatgtaccctaaaacttaaagtataacaaaaaaaaaaaaaaagaagcacttaaactaaactcattagggaggaaaaacacaagtagagaagtaaaggtttgtgaataccaaacgcatggcagtccaggaggcagagtggacactgctcttgatgtgagacatgtttacctgaagaaaagccattttttctctttcttctccttctctggagttccttctcagatgagaccctctgaacaaattacacctgcatcttgagaatatgcctttaaggatgtcagtgccacatatttacctgctagcatgacaacaactggcagaaaaagaaaaagtccagccatttctttcctttaaaacagaagagattcaggaacaatgtgctgctccatgaagataatagtatgtttctcctttcctttcctcaggtgccatcacctgccacagacaccagcaatttcttctacagtaatgcagatatatgccacactgacctgtccctaccaaatccaaacagaacaggacttgtaaccaccctttagtgcaaaagtggaacttaattctcatgactgtattttgaagtgttcatacttgattctggcctcaccttagagtcacatgaggcccttaattaaaacaacctgaatgcttccacccagaggaataaacagaagctgtggggagggcacaagatatttctgcaaattggccatgttgtcctagtgacaagcctgggctgataaccactaagctaagcattttctctcaagctttaacgagcttataaatcacttggtaaatttgaccccactttatgtaatgtgattctgcaggtttgaaaaaggtccataaataggtgttttaaacaagtttcctgtcaatgctgatgttgctcccccttcgctcattattagcattagttagagaaagcaggcacagtacagggttccttacactctgaactcttgtaacaaccaaatacttctggtacaaataaggacaacccatctgcatcctaaagacatattatttgctggctctttaaagttgacagagaaaataggaggcagcaatatctcaatacgtttggatttaaaaacaacatgtacacctgtactaatgcaatgtttattaagcaggtactatgagctcaagagtaggatacagagcactgtgctgggcataacacattatgtgatttaattctgataacaacctgggagctggtactaagggtttaataatttccaggatttagataaagggcccagcatttttatttcttcttgtttctctgtcatcaaaccttttaaaaattgtaaagaataaaagctaaatatagacagatgagagaaatatagaaaggaagagtttaatgtagtgtacagaaaattttattctgtttatgtttactttttttgtgacttgtgtagcaatgactgggtctgtaggaatagaaaacaagttactaaatagaatgtctctgcaagcactggttttaatagaaaatttaaaaactaatacccgacaatacataatttatttttcctatttatctgcttttgggtttcagaaatttgtgagcaccaggtctagaaatgcaacaggattccccagccaaaactctgatcccttctaatcagttctgtgaggcaagacttcagggtaggttcagacctaaataaggcctccaaaaagggttaatctgaacaggtctgtgacaggaggaagaccctatgtagaattctgttctctatggcactacagtacttccagttttgttttttctaagcttacctaaaagaaacttaaatcccagagtttctgtaattttagactcttctagccactatcctgtcaactttatactatatactaatatgcaattacataaatcccttaaagttttctagggtaattttttttggtggggggtatggagtcttgttctgtcacccatgctgcagtgcagtggcatgatcttggctcactgcaacctctgcctccctggttcaggcgattcttttgcctcagcctcctgagtagctcggatgccaggcatgcaccaccatgcctggccaatttttgtattattacaaaaccatatatttgccaagctggtcttgaactcctgacctcgtgatccacccatctcagcctcccaaagtgctggattacaggcatgagccactgcgcccagctttctagggtaattttattagaaaataaatatgtacacgtagcaaggtaaaagaaataaaaattatacagctgggcacaaaggctcatgcctgcaattccagcactttgagaggccaaggcagttggatcgtgatgtcaagagttcaagaccagcttcaccaagatggtgaaacacgatgtcgactaaaaatacaaaaatcagccaggttcagtgggagccacctacaaccccagctactcgggagactgaggcaggagaatcacttgaacccaggagacagagattgcagtgagccgagtttctgctattgcactctagcttgggtgatagagtgagactatctctctctctctctctctctctctctctctctatatatatatatatatatacacacacatacatacacacacatatatatttaataacaattctgttcatgaatatccctacaggtgtagccaacagaagtcacagcaatataaagaaagtggcctaaataaagcccaagattttggacacatctctttgttggaccaaccatatgatgcttaatttaattatttacccagttgctagtctagattaaaagtttctggattgtaggaaccatgacttcttcattttttttttaacgactacatgaaatggaagcaactagtttatctatttgggtctccagatcttttccttgtttattatccaagtaccaggaaactggagaaactgtcatctgtgtatcaaccaaagacacctcttgtatgaggggatgaacaaatacaggatgactcacttctcttacactgagacagaagcagaattaaccactcttgtcagcctgaaacaattctactctggccatcctgaaatgcctcaaacacacctaggtgattgtgagagaattcccagtgacccagggctgatggcccaataataagccaggctggagagactcaggctgattctaaataaaaaatggaactgcctggctgagtgcggtggcttctgcctgtaatcccagaactttgggaggccaaggtgggtagatcacttgaggtcagaagcttgagaccagcctgactaacagggagaaactctgtctctactaaaaatacaaaattagccaggcgtggtagcacatgcctgtaatctcagctactcgggaggctgaggcaggagaatcagttgaacccaggaagtggaggttgcagtgagccgagattgggccattgcattccagcctggggaagaagactgaaactctgtctaaaaaaaaaaagaaaaaaggaaaatgaaactgccttggttgagctccagaacctggatcacctgtcctggtttgctagctcttgtgtaagggaaagaacaaaaatactctactccagtaacacattttacaggtaaatatagttgtggccatggctctgcatatgttgtagcctgataatgggaatgggagcagtgtttcagccccagcttctacttataatggtgacatggaaaaaatactgctgagtttccagcatgagtccagatagagatagctccaaaagttctcactgcgacagcccacctcattcaggcaccatgggatactaatagggcttctgaaacagacaaagcactggagagaaaaacagatctccatctgagcaagattattttgaaagaagaaagttaaaaagatcttaagaaaaagcttagattagatataagattgattatgtcagccagaaaatattcccctaaaagaaatttctctctaaacacccaatgtacatagcatgagaaacatatgagcattatgaaaaaatggggcatattttcagaggaattttatagaagtttcttttccatctctgctgctctctcatgtcatagccattgaatgggggttctatactgaaatacatctgacaacttaacactttttgatgaataaatagaatctgactgtgttcatatagtggaatacattagaaattgcaacatagctaactgaatagttattatggtgtttgggtggccacatcacctgtctttatttatcctgtaatagcagcattccaatttagtgaaataaaagatactaaaattgtgtttagtcataattattcctattgaataaagtaataaacacgtcagactaatatctactgtaacaatttggtagtaaattttcttttgatattagatataaataagtatgaataattttaatgaactagtcataatgtatgtagcatttttaaaaattgtaactatagttagtttaaaacactttatatttcaaaagggtaattaacaatattaaaataaccatttaagtgattcaaagtaattattgtggcttcatattcatactattgtagaaaatactgtttatggctcacacctgtaatcccagcactttgggaggctgagggtgggtggatcacccaaggtcaggagatcaagatcaagctggacaacatggtgagaccccatctctactaaaaatacaaaaacttagccaagcgtggtgatgcaagcctgtattcccagctactcaggaggctgaggcaggagaattgcttgaacccagaggcagtggttgcagtcagctgagatcacaaaactgcactccagcctgtgcaagagagtgagactgtctcaaaaagggggaaaatactgtttaatttatatgaatgcaggttgtctacaaacactacacataactatgctaattgttctgaagtaataaatacaaagcaagataaaactacagactccactgttcagtttatgcactgaactgttcttccttttgctgtataggtacttcagcctgcaaatattagataatcaccgtgtggaaaaggtgacatagaggttcctcttcaaagactttcctccctatctaattaggaataaatagtaacttctcttagaagcaaaatttatttgatgggtccattccaagatggccgaataggaacagctccggtctgcagctcccagtgtgatcgatgcagatgatgggtgatttctgcatttccaactgagcaaatggcacaccaagagattatatcccatgcttggctcagcgggtcccatgcccatggagccttgctcactgcttgtccaagaccaaactgcaaggtggcaagcctggctgggggagtagtgtctgccattgctgatgcttaagtacataaacaaagcagcctggaagctcaaactggttggagcccaccacgggacactgaggccaacctgcctatgtagactccacctctgggggcagggaatagctgaacaaaagggagcagaaatttctgcagacttaaacgtctctgtctgacagctctgaagagagcagtggttctcccagcacagtgtttgagatctcagaatggatagaatgcctcctcaagtgggtccctgacccctatgtagcctaacttggagacagctcccagtaggggctgactgacacctcatacagccgggtgcccctctgagatgaagcttccagaggaaggattagacagcaatatttgctgttctgaaatatttgctgttcggcagcctctgctggtgatacccaggcaaacaggatctggagcggacctccagcaaactccaacagacctgcagctgagggacttgactgttagaaggaaaactaacaaacagaaaggaatggcatcaacatcaactaaaaggacatccacaccaaaaccccatctgtgggtcaccatcatcaaagacaaaggtagataaaaccacaaagatggggagaaagcagagtagaacagctgaaaattctaaaaaccagagcatcccttctcctccaaaggatcaaagctcctcactagcaatggaacaaagcaggatggaaaatgactttaacaagctgacggaagtaggcttcagaaagtcagtaataacaaacttctccgagctaaagaaggacgtttgaatccatcacaaggaagctaaaaaccttgaaaaacgattagatgaatggctaattagaacaaacagtgtagagaagaccttaaatgaccccatggagctgaaaaccatggcaaaagaactacatgacacatgcacaagcttcagtagctgaatcgatcaagtggaagaaaggttatctgtgattgaagatcaaatgaatgacatgaaatgagaagagaagtttagagaaaaaagaataaaaagaaatgaacaaagcctccaagaaatatgggactatgtgaaaagaccaaatctacatttgatttgtgtacctgaaagtgagggggagaatggaaccaagctgaacaacactcttcaggatattatccaggaaaacttccccaatctagcaaggcaggccaacattcaaattcaggaaatacagagaacaccacaaagatactgctcaagaagagcaacctgaagacacatcattggcagattcaccgaagttgaaatgaaagaaaaaaagttaagggcagccagagaaaaaggtcgggttacccacaaagggaaacccatcagactaacagctgatctcttggcagaaactctacaagccagaagaaagcggaggccaatattcaacattcttaaagaaaagaattttcaaaccagaatttcatatccagccagactaagattcataagtgaaggagaaataaaatactttacagacaagcaaatgctgagagcttttttcaccaccaggcctgccctaaaagagctcctgaaggaagcactatacatggaaaggaacaactggtaccagccactgcaaaaacatgccaaattgtaaagaccatcaaggctaggaagaaactgcatcaactaatgagcaaaataaccagctaacatcataatgacaggataaaattcacacataacaatactaaacttaaatgtaaatgggctaaatgctccatttaaaaggcacagactggcaaattggataaagagtcaagacccatcagtgtgctgtattcaggataccagtctcatgtgccgagacacatataagctcgaaataaagggatggagggagatctaccaagaaaatagaaagcaaaaaacagcagggctagcaatcctagtctctgatgaaacatactttaaaccagcaaagatcaaaagagacaaagaaggtcattacataatggtaaaaggatcaattcaacaagaagagctaactatcccaaatatatatgaacccagtacaggagcaccctgattcataaagcaaatcctgagagacctacaaagagacagactcccacaaaataataatgggagattttaacactccactgtcaatattagacagatcaatgagacagaaggttaataaggatatccaggacttcaactcagctctgcaccaagtggacctaatagacatctacagaactctccaccccaaatcaaaagaatatacattcttcttctcagtaccacatcacacttattccaaaattgatcacataattggtagtaaaacactcctcagcaaatgtaaaaaaaagaaatcacaacaaactgtctctcagaccacagtgcaatcaaattagaactcaggattaagaaactcactcaaaaccgcgcaactacatgaaaactgaacaacctgctcctgaatgactactgggtaaataacgaaatgaaggcagaaataaagatgttctttgaaaccaatgagcacaaagacacaatgtatcagaatctctgggacacattcaaagaagtgtgtagagggaaatgtatagcactaaatgcccacaagtgaaagcaggaaagatctaaaattgaaaccctaacatcacaattaaaggaactagagaagccagagtaaacaaattcaaaagctagcagaagacaagaaataactaggatcagagcagaactgaaggagatagagacacaaaaaaaaacccttcaaaaaaatcaatgaatccaggagctggttttttgaaaagatcaacaaaagtgatagacactagcaagactaataaagaagaaaagagagaagaatcaaatagatgcaataaaaaatgataaaggggatatcaccatccatctcacagaaatacaaactacgatcagagaatactataaacacctctatgcaaataaactagaaatggataaattcctcaacacatacactctcccaaaactaaaccaggaagaagttgaatctctgaatagaccaataacaggctctgaaattgaggcaataattaatagcctaccaaccaaaaaaagcccaggaccaggcagattcagagctgaattctaccagaggtacatacaggagttggtaccattccttctgaaactattccaatcaatagaaaaagagggaatcctccctaactcgttttatgacaagagcatcatcctgataccaaagcctggcagagacacaacaaaaaagaattttagaccaatatccctgatgaacatcaatgcaaaaatcctcaataaaatactggcaaaccgaatccagcagtacatcaaaaagcttatccaccatgatcaagttggcttcatccctgggatgcaaggctggttcaacatatccaaatcagtaaacataacccatcacataaatagaaccaaagacaaaaaccccatgattatctcaatagatgcagaaaaggcctttggcaaaattcaacagcacttcatgctaaaaactctcaataaactagatattgatggaatgtatctcaaaataataagagctatttatgacaagcccacagccagtatcatactgagtgggcaaaacctggaaacattccctttgaaaactggcacaagacaggtatgccctctctcacctctcctattcaacatagtgttggaagttctggccagggcaatcaggcaagagaaagaaataaaaggtattcaatcagaaaaagaggaagtcaaaattgtccctgtttggctgggcatggtggctcacacctgtaatcccaacactttgggacaccgaggtgggtggatcacaaggtcaggagatcgagaccattctggctaacatggtgaaaccctatctctactaaaaatacaaaaaaattagccaggcatggtggcaggtgcctgtagtctcagctactcaggaggctgaggcaggagaatggtgtgaacctgggaggcaggtttgcagtgagccaagattgtgccactgcactccagccgggcaatagagactgcgtctcaaaaaaaaaaaaaaaaattgtccctgtttgcagacaacatgattgtatatttagaaaacccattgcctcagcccaaaatgtccttaagctgataagcaacttcagcaaagtctcaggatacaaaatcaatgtgcaaaaatcacaagcattcttatacactaataacagaaaaacatgggtgaactcccattcacagctgctacaaagaggataaaatacctgggaatccaacttataagggatatgaaggacctcttcaaggagaactacaaaccactgctcaaagaaataaaagaggacactaacaaatggaaacacattccatgctcatggataggaagtatcgatatatggtcatcagagaaatgcaagtcaaaaccacaatgagataccatctcacacaatttagaatggtgatcattaaaaagtcaggaaacaacaggtgctggagaggatgtggagaaataggaacgctattacactattggtgggagtgtaaactagttcaaccattgtggaagacagtgtggcaattcctcaaggatccagaactagaaataccatttgacccagcaaccccattactgggtatatacccaagggattatgaatcatgctactataaagacacatgcacatgtatgtttattgtggcactatttgcaatagcaaagacttggaaccaagccaaatgtccatcaatgatagactgaattaagaaaatgtggcacatatacaccatggaatactatgcagccataaataatgatgagttcatgtcctttgtagggacatggatgaagctggaaaccatcattctgagcaaactatcgcaaggacagaacaccaaacattgcatgttctcactcataagtgggaattgaacaatgagaacacttggacactgggggggaaacatcacacaccggggcctgttgtagggtggggggatggaggagggatagcattaggagaaatacctaatgtaaatgacaagttaatgggtgcagcaaaccaacacggcacatgtatacatatgtaacaaacctgcacattgtgcacatgtaccctagaactaaagtataatactaaaaaaagcaaaatttattcaaaaacctgtgctaacgttctcaaatatctgatagctgtaataaagaaatcaatacactttatgttcttaactcccacaatttagctaaatatttcctggacatgcttatactggtccaagcaagcattaggccatagcctgttccttatttgaaggtgtttttacctttctcagcattccacaagttacttcctccttcctttgttctcatctgcctttgcctcttttaaaaagttctaagttgctagccaattgggacaaatacagaatgtgagatcctgttccagcctttggaaactggacacagcagtagggtggatgcttcaggttataaacaaccctgtctcctttgttcagtgtactctcatgacaaaactattaatgagtgtaccctttctgcagaaagtaaaaatggccttgctgataaaattaaacttatgttctagtgctatttcgttatggcaccggggaacaagcatttctaacaattttgttggcccatatggggataccttctcctccaggtgtggtctcccatcctctctcatgaggaagcgtgctcctctgcctcattgcagtggcctcagggataaggaatcaagacccatccagtgtgacaaataaacctggactctcaccaatgcagaaaaaaaacaaaaaacctgaccagtgaccaggagtaaaggattctcacatatcacatgaaccagaaaactctgtgcacagaccgaggtaaaaaaacaccgggagagctgctaaagtatttcctttgtggttgggactaaggaaaaagctgcagggcggtaacacattccttgattaggatataccaaggagagaaatgcaggggtggtaaatcattccttagatgggtctagggaaagaaaaccagggggggctgtgaaatattccttagctgggatatcttggagattaaaaagaggggagaaatccccatttggggggtttgaatctcaaaaagaggtaagaaatccccactgcgggagtggaacctcaaaaagaggtaagaaatccccaatgtggggattgaacctcaaaaagaggtgagaaatccccatggtggggtgaacctcacacaaacctctggtagtaaaaaaaagaattcaaaacttccctttcccctcttcttggggaaagaaaaatgctaagctccattgccaccagtcgctcccctaggggaaagggaaggagaggggggaaatcagcaggtggctgttagaggcaaaagaaagaccacagagaggaaaaagaaactaggagaagacgtcaaagtaaaagagagcaaaaacagtaagcgcagtgccagacagccaggcatgccaagggttaagtccctttccccagcccagctctatgtgaaaaagagggtggggaccagtagcaggagtagagcagagtaggtgaaagaacacaattcttgcaacttgcggcaggcaccttccaagcctgtgggccagtgatggcccagcacccagactgcagccatacaaatcccacccagcctgagaaactaagtgtaggaaaaaagaaagaaaataaaaagggaaatcggaaaaaaaaataaaaaccaggagaaacagatggcagcactttcacagaggtggggcctatgccattgcccagccccgccagagaactcgggagggaaaaaggaaacaggacatgacagagagagagacaaaaaggagcacaaatgagagagagagaaatagagggaaataataagtaagagagagactggaagagagaaatcaaaggaagactcagagggtgaaactaggaaaagaaatagtgtaaaaggaaggcagaaagttaaaacatgttgaagattgtgaaagtcataagaaaaattataaaagggaatttatgagagaaatattatataatttaaaagtaattaggcctcctgaatgtaaaactattcaaaaaaacagtttatgtacaaggtatataagaaaaataaaatatacttttcaccatagaatagtgtgcagccataaaaaaggatgaattcatgtcctttgcaaggacatggaggaagccggaaaccatcattctcagcaaactatcacaaggacagaaaaccaaacactgcatgttctcactcataggtgggaactgaacaatgagaacacttggacacggtcaggggggaacatcacacactggggcctgtcagggggtgggggtctgggggagggatagcattaggagaaatacctaatgtaaatgataagctgatgggtgcagcaaaccaacacggcacatgtatacctatgtaactaacctgcacattgtgcacatttaccctagaagttaaagcataataaaaaacaagtaaataaaagtgagttagaaaaaaataaagaaaaataaatatacttttaataaaaggattataaggaggcatacgaatatggatttttatctacattaaaaggttaaaaaacattttgttttagaggtttaagcaagttttaaaatattaattgtaaaggaaactctgtgtgaaaacatattggctaaagttaaaggggtatcatccagttttcctgtgaactggacattaaaataaaagcacaatagatttttcttaaagcactaacctgctctttaacaaaaattataaaaggttaaaaagagtctataaaaattttaccttatagtcagacattaaaagtgaataaataatgtctacaagattttatttaaattaagtttaacattaatagcacattaatataaaggtaaaatttaacttatctggtataaaatcatacaaaaatcattgtcaaatataaaatgatgtttagctttcctaaggcccgagggcggccggttaagtcacaagggccctcatccccaaggccacaacacgcggggacagtgaaggtcacaagaaggccaagaccttaagagggggcagggccacagcatcccctggacagcgctaagcaggaatggagcgggaggcatcaccatgggtcctcaagccccaggatatgcagcagaaattatatacttaatttatcttccactttcccttccctcaaaactaaaagtcttttaacacaggtaccacccctagaatttccagtacaccagcaccagcctgaaaaccaagtcctcatcagaagccagaaaggaaagaaaaaactcaagccagcctgggaaggaccctatcttatgctgttaactactgagactgccatctgcacagccgagaaacaatggacccaccatacccgagtcaagaaaacatattcctcatcagaatcatgggttaccgtactaggatcaagccctgctaagttaaagtttaaaaaaagcttaattttcatataccttctatattgcttcccttcctttccttattcccttactagctccttttttattaatgttactaagtctgactcacctcagaccattgcctttaatgcttgctctgtcatacattatggaaatgtaaaaaatcaatgacagctagccttttcacacaaatatttatgtcccagtcctctaattgacatagttacccctggcactcatcgttgtaatcacctgtagccaagacgtcaattttctgctcctacagcctggaaaccttgtagtaaatgggactacttcctttaaactactcaggagcaaagttggacttccatgaaaaaggtttgtgcatatctaaaacccctcatctatttcacaaaaagaactaccccttctaactgtcagccttatcaatgaaaccctgtccttctctctatcactacctccaccttaactaactctagacctgcccttagtcgcttctatggtatggggattgacataaatggaaaagaccccctaggtatttttaaaatatgcatcattcccccatcttccccttcttcagtagcctcagttctagatcccacaccggttgctcctacatctaataataaaactagggtgtctattgtaaaaataagagatctaagatagaccttagccatcaagataaaatatcaagatgcaaatgcctggttggaatggattaaatattctgttcagactttttaaaaaagtgattattatgcttgttcacaccataggccagaggcccagattatcccctttccactcagatggtcttcttgtcaaccaaatatggactgtatggggcctctctttcagaaacccattgcttcggataatccatcatgctgagctctctctctgctatttcctgagagtcagcccctgagggcaatccagcttccacctctagatgccaagtttacttcgtgcctctcacagcaaggggaaaatgtggtgttccttggaagcataaaaggatgcaaagacctcaatcctttccaagagcttgaccatcagtccatgcgtagccatccccaagcaaatgtatggttgtactgtggaggacctttactggacgctgccaaataattggagcagtacttgtcctctaatccagttggctaacccattcaccctggcatttcatcaatctaaaaaaagtaaaaacaaaacagtgcaggccaagggaaactccttataaatcctttaatcctcaggtttacgtaaatgctattaaggtcctgtgagaagtgccaaataagtttaaagcacaaaatcaaatagctacaaaatttaaatccacgttgttctggtaggtaactataaataaaaaaagttaactaaatacactatatctattacaatcagcaacaattcacaaattgcactagggacgccatcaaggggatagctaagcaattaggacgtaccagccggatggcctagaataataaaatagctttaaatataacactagcaaacaatctaagctgatcccggttgacttagacccaaactttttccaaatagggtaaatgcgcgatttgcgagaaagggagaagagggaagaagaagcggtgtggttgatttacaacttttacaacttatcaccaggaagttgagtctttgaaaaggatctttgttgtcctaacaaccccttaccccaagtgatccacccacctgggcctcccaaaatgctgggattaaaggagtgagccactgtgcctggccccacaaatttttaataggagaaaagagaagctgtgaaccccatggatcaaagctcttcccattcatgaacctgcaccctgacgcaagattctcccctgatgaccctcccatggtccctgcacaatctgggagagacgccgtgctgtgggtgcagagctgcccagagagggctccaggccagtgcacagtcactgaacagggaagagactggatgcccaggggcctgcctgtcagcggagccgccatcttacggctgaacgggactgaggctgagctggacaaggacacctcagggcgcagattgtggagctgacttcggggaggcctgaatcccaccacagccacttcccactgattccaaccagtccctcccctctcttgggatgtccaattggcaccctcaccatttctaggcttccagaaggtcccagcatcttagctgtggatctcccaataccggcaggacacagagccacagaggctgggcctctaggagcagaggacacagaggactgaagacgagacctggagctcctgctgcagcaagagacaaagtccgcgccaaacccagaagttgtcctgttctctccagctgggtgtctgattggacggtttccagctcagagttcctgattggataatgcttaaggtcccgccccctcaggccttgagtgacagaagatgtgatcaggtgctgggctgagtgaagaaagagcaacagcctaagctgcagccttttcaggcagggcttcctccctgagctgagccaggcccaccccagaacatgagaaaattctgtctctttttcactctcggtctttttgaatatattcaaaaggtgaacagaagtactttgctgtcatattaataatacataaaatttttgttcaagagaaaatcaacttttactttggtaatagcgtattatcaatactaaagctaattttaataaaaccttaaaaataaatcaaatttgtcatttttgacctcgagatttacatatatattttgcattctcttgtaatttttttatctttttatattttctttttctctacattctttttattttttttctatttgaaacaaccattaagtaatttcaaaccgttataggagatagaaagaaatcatttagggccagatgcagtggtgcacacctgtaatcccagcactttgggaggccaaggtgggcagatcacttgaggtcagaagttcgagaccagtctagccaacgtggttaaacccaatctctactaaaaatgcaaaaaattagccaggcacggtggtgcacacctgtagtcccagatgctccggaggctgaggcaggagaatcgcttgaacccaggaggcagaggttgtgtgacagcccaaggggttccccttgccctttgcccagagagagctgattcatcaagacagaggaatttgtggaggaaaaattaaatattaaatttgaactcaattaaacatggacacaaaaaatagacaccaagtcctgaaacaggttatgtgagcccccttgaggtgttcatcctgcactgttttggagaaatctctatttcagtctattcctacacattagttattgaaaaacaatagacgatcacaagaaaacaagttgacctttttgtgttccttgagctcagtcgcaaagggccctcatgactgggcctcataccaaacaactcattacaaaaagagctagggccccagaccacaccgaagcttcaggagacctctccttatctgtgcaaggatggatgaccaactcttgagcccaaggtgttgcttcccagtctggtggtgaatcctccatagtctgatgagtgtggtgttcaactctggagtccagcctgttgcttcttggtctggtggtgaatcctccatagtctggtgtggaggcaaagttaaatagcaaatttaaactatatgaatgtggacacaaacagtggtcaccaagtcctggaacaagttgtgtgagcctattgaggtgttcattcagtgctgttttggagaaatctctatttcaatgtattcctctacattcgttattgaaatcaatagacaatcgcaaaaataagttgacctccttgagcccagttgcgaagggccctcatgactgtcacacgtgtccgtgtgaagagaccaccaacaggctttgtgtgagcaataaggctgtttattcacttgggtgcaagtgggctgagtctgaagagagtcagcgaatggagatggggaaggggttgcttcataggagttgggtaggtaatggaaaattacagtaaaaggtggttattatctattgttagcagaggagggggtcacaaggtacatggtgggtagatcataagactcactgtccagaagaagaatgtcacaaggtcgattgatcagttaaggtagggcagggacaagtcacaatggtgtaacggtgtaacgttggttaatcagttgaggcaggaactagctcttttacttgttttgtgttttttcagctgccccagatttcttggctcctgcaggccacctggatgtgtatgtgcaggtcacaggggttacaatggctgagctttggctcaaaggcctgacattcctgtctttttatttataaaatataaagttacaagataagataaagaaaatgtaagtttttactgaggataattggggtaggggtgaagtttctcagggctgcttcaggcatgacttaggggtggtgtgaacacctaaagaaaatgtaattttatagtgagttggtctagaaagtttttgggtacaattctgtgtggcaaacaaggcatcagctagcatatttttgagcttggaattgtcctaatatagtaaattctctaaaaaatcgtaattaagcataatagctttaaggtaggtggcagtgagtttttaggccaaggtaagaataatgttttatatagtaaagctttttgtctccattttccatcctacaaataggatccctagagtgaagccaaaagtctattatattacctttttcctaaaggtgtgagtggagttttgaatggaagagttcaatagtcctgattgcagaccttatacaggaaagataataagtacaatagtccctgtatcctggaataagttggggctggcaaagagagaaatgtcctaggccttctaacaaccaacgacagaccatatgttgtcctggatgttcacctgaatgccagatatgtggaactagtcctgtatatgcatattgctggtaatttttatatgagtaggcctgaggacaccatgggtgaggatttgacacctgtcaatccaggcattttagatttttaatccagagatctttgattttgggggtggggaaaatcttggaggacaaggcctgaagaaagttgtttttagagacaacaggtcctaagagattagcgtttagaggactgggtgaagcaggcctggaagtatgtttggacagccatttggaaggggtgttgcatggaagcttggtcttgtctggatgctgccaggagttcatcattgacttagtcttaaaggtgagaaggtgagaaggagtataaagatgagaaggagtgagaaggagtataataggtgagaaggtgagaaggagtataacaggatgaggaatagaagtttaggctgtggggcgattttagggtacatgatagtactgtggggttgttagaagcagcaactgccatatggaatgattggtgatggcctggatgcagttttgtatgaattgagagactaaacgaaagacctttcactgtcacacactcattttcacagtaagaacctgttcgctgtcatccaatcattcacaacagtgggaacaagttcactgtcacccacttgtttacagcagtaaaaacctgttcactgtcagccatgcagtcaccacattggtaacctgttactgttaaacactcattcaacatattgggaaccatttcactatcacaaacacattcaacaccctgagaacctgttcactgtcacttactcattcaccacagtgagtacctgttcactgttacccactcattcaccacagtgggaacctcttcactgtcagccactcactcatcatagaggaaacctgttcactgtcatccactctttcaccacagtggatacctgttcactgtcacccacaaattcacaacagtgggaatctgttcactgtcagacactcattcatcacaatgggaacctattcactctcacccactcattcatctcagtggaaacctgttcactgtcagccactcactcatcacagtgggaaactcttcactgtcacccactcattcaccacagtgggaacgtgttcactgtcattcactcattcatcacagtggtaatgtgttcactgtcacccatcccatcattacagcaggaacctgatcactgtcatctactcattcatcacagtgggaaccaattcactgtcagccactaattcaccacattggtaacctgtttcctgtcagccactcattcaccacagtgggaaccagttcactgtcatcccctcatttacagcagtagaaacctgttcactatcagccactcagtcagaacagtgtgaaccagtttactgtcagccacaccctcatcagactgggaacttgttcaccctaacccactcatttatcacagtgggaacctgttcactatcacccactcattcaccacagttggaacctcttctctgtcacccactcacacatcacagtgggaagctgttcattgtcgaccaccccttcattgcaagaggaacatttaactgtcacccactcattcttcacagtgagaaccagtttactgtcacctgatcattcaccatagtgagaaccagttaactgtcacccactcatttgctgcagtaaaaaccggttcactatcagccactcagtcaccacattgggaaactctttactgtaaattactcattcactgcagtgggacccagttcactttcacccacacattcatcacagtgagaacctcttcacagtcacccactcactcaacatagggggtacctgttcactgtcttccactcattcatcacagtgggaacctgttcactgtcccccacatattcattacattctgggaacctgttcactatcacccactcattcatcacagtgtgaacatgttcactgttgcccacttactcaccacactgggaacttgttcactgtcacccactcaatcatcaaagttggaacctgttcactttcactgacaaattcaccacagtgggaaccagttcactcccacacacttattcaccacagtgggaacctgactactgtcacccactcatttatcaaattgggaacctgctaactgtcacccactcattcattacaggaggaacctgtacactgtcacccacttattcattacaggaggaacctgtacactgtcacccactcagtctacacagtgggaatctgttcattatcaaccactcattcacaactgtggaaacctgttcacggtcacccactcgttcacctcagtagaaacctgttcactgtcaccactcactcactcactacaatgaaaacctgttgtcagccactcattcatcagagtgggtacctgtcactgtaacccactcattcattactggaggaacctgatcactgtcactcactcattcaccacagtgaaaatctcttcactgtcagccactcattcatcacagtgggatcctgttcactgtcacccactctgtcctcacagtgggaatatgtacactgtcaccaactcactcatcactgtgggaacctgttcactctcacccactcatttacctcagtgggaacctgttcattgtcacccactcaatcatcacagtgggaactttttcactgtcatccactcactcttcacagagggaacctgttcacagtcagccactcactaaaaacactgggaacctgttcactgtcaccaactcactcatcacagtgtgaaccttttccctgtcactcactcattcatcacattcaaaacctgttcactgtcacccactcattcatcacagtgagaacctgttcactgtcacccacacagtcctcacagtgggaacctattcattgtcacccactcattcattacaatgggaacccgttgtaattcactctcacccactcatttaccccagtgggagcctgttcagggtcacccactcactcatcacagtgtgaacctgttcactttcacccactcctttctcacagtgggaacctgctcactgtcacccactaattcatcatagtgggaacccgttcactgtcacctactcactcatcatagtgggaaaaaggacacttttacacaaacattcactacagtaggaacctgttcactatcaacaactcactcatcactgtgggaacctgttcactctgacccactcatccatcacagaggtagcctatttgctgtcacccactcattcatcacagtgagaaccagttcactctcactctctcattcaccaaagtgagaacatcatcactgtcacccactcactcatctcagtgggaacctgttcactgtcagccactcattcctcacagtaggtacctgttcactgtcacccaataattcattacaggaggaaactgatcactgtcacttatgcgttcaccactatagaaacctgttcactgtcacacactcattcaccccagtgggaacatggtcactgtcagccactcattcaccattctgggaacccgttcactgtcacccactcactcacccagggggaacctgttcactgtcgcacacttcctcatcacagtgggaaactgttaactgtcagccactcattcatcatagtgggaacctgttcaatgtcagccactcattcaccacagtgggaacctgttcactctcacaaactcactcaccagagcagtaacctgtttactgtcagccactcattcaccacaacaggaacctgttcactctcacccaattactcatcacagtaggaacctattcactgtcacccactcattcatcacagatggaacctgttcactctcaaccactccttcaccaccttgggaacctgttcaatgtcacccactcatcatcagagtgtgaacttgttaactgtcagccacacattccccatagtgggaaccagttcactttcattcagtcgttcacggcagtagaaacctgttcactgtcacccacttatttatcactgtgggatcctgttcactgtcagacactgattaatcacagtaggtaactgttcactgtcattcactcattcattacaggaggaacgtgatcaccatccaccactggttcacgacagtagaaacctgttaactctcacccactcattcaccacagtggaaacctgttcactgtcagccactcatttaccatagtggaaacctgttccctgtcaccctgtcactcaccacattaggaagcggttcactgtcacccactcagtcatcacagtgggaacctgtttactgtcacccactcaatcatcacagtggaaacctgttcactctcacccaaccattaaccacagtgggaacctgctcactgtcacgcactaatttatcactgttcactatcacacacacattcaccggagtagaaacttgtcccgtcacccactcactcatcacaatgtgaacatgttcactgttagccacccattcatcacaatgggtacatgttcactgtcacccactctttcattacaggagaaacctgatcactctcatgcactcatttaccacagtagaaacctgttcactgtcactcaatcactcaccacagtggaaatctgttcactgtcagccactcattcatcactgtgggaacctgtttactatcagctactctaccaccacagtgggaaactgttcactgtcacccactcactagtcacagtgaaaacccgttaactgtcattcactcactcatcacagtaggaaactgttcactgtcagccactcattaaccacagtgggaacttgttcactgtcacgtaataaatcatcacagtgcgaaactcttcactctcacaaactcattcaccacagtggaaacctgttcactgtcacacactcgttcatcacagtgggaacctgtttactgtcacccactcattcattacaggaggagcctcttcactgtcagcccctcattcatcacattgggaagctattcactgtcagccactcactcaccatagtgggaacctttttaatgtcaccaacatgttctccgcagtagaaacctgttcactgttactcatttactcatcacagtgggaacatgttcactgtcatacccttattcatcgcagaggaaagctgttcactatcaggcactcattcaccagagtagaaacctattgactcactcacacactcatcacagtgagaacttgttcattgtcagccactcatacatgacagtggacagctgttcactgtcacacactcattcactacaggaggtaccccattactgtcacccactcattcaccacagtagaaaccggttcactggcacccattcattcaccacagtgggaaactgttcactctcaaccactcatttattacagtgggaaactcttcactgtcaaccactcattcagcacagtgggaaactgttcactgtcacccacttattcaccacagtaagaccctgttcactgtcacacacgcattcatcatagtacaagcctgttccctgtcacccactcattcatctaagttgggacctctttactccaaccctcacattcaccacagtgggaacctgttcactgtcacacactcattaatcacagtggaaacctgttcattgtcacgcactcatttattacaggagaaattggttcattgtcacccacttattcatcacagtgggaacttgttcatgttagccactgattcacaacagtgggaaactgttcactgtcacccactcgttcactgcagtagaaaactttccactgtcacccactcattcatcacagtgggaaactcttcactgtcagccacttattcaccacagtggaaacctgttcactgtcacccatgcattcactgcagtataaaactgtccactgtcacccactcactcatcacagtgtgaaaatgttcactgtcagccagtcattcatcacagtgggtacctgttcactgtcacccactcattcattacaggataaatctgataactctcacccactcattcaccccagtagaaatctgttcactgtcatccactcatttaacacagtgggaacctgttcactgtcagtcattcattcatcgcagtgggatcctgttaactgtgagccactcattcaccacagtgggaaccagttcagtgtcagccactcattcaacacagtgggaccctgttcactgtcacccacgcattcatcacagtggaagcctgttcactgtcacccactcattcattacaggaggaacctattcactgtcacccgctctgtctttaaagtggaaacctcttcactataatccacacattcaccacagtggtaacctgctcactgttacccacttattctttacaggaggaacctgttcaccttcagccactcgttttcacagtgggaacatgttcactgtcagccagtcattcaccaagttgggaaccagtttactgacacccactcatttgccacagtagaaacctgttcactgtcagcctctcagtcaccacattaagaacctgcttacagtcagcaactcactcatcacagtgggaacctgttcactgtcacccactcatttctcacactgggagcgtgttcattgtcagtcacacatttaccacagtggttacctcttctctctcagccacttattcaccacagtgaaaacctgttcactatcacccactcactcttcacaatgggaacctgttcactgtcacccactcactcatcacagagggaacgtcttcactgttacccacttattcaccacagtgggaacctgttcactctcagccgctccctcattacattgggaatctgttggatgtaaccaacttattcattacaggaggaatctattaactgtcacccactcattcatcacagaggaaacctgcttactgtcacccattcattcatcacactggcaacctattcattgtcaccactcactcatcacagtgggaacctgttcaatgtcatccactcattcatcacagtggaaacgtcttcacagtcacccaataattcattacaggaggaatttgttcactgtcactcgctcattcttcacagtttgaaacttttcactgtctctcctttttcatcacactaggaaactgttcactgtcagttactaattcaccacagtgggaaactgttccctgtcaggcactcactcaccacagtgctatcctgttcagtgtcacccactcactcatcacagtgggaacctgttcactggcacccaatcattcatcacagtgtgaacctgtacactctcatccactcattcctgacagttggaacctgttgactgttacacactcatcacagttggaacctgttcgctctcacccactcaccacagtggaaacctgttcactctcacccactaacttatcacagtaggaagctgttcacttgaacccaatcattcatcacagtggggaccttttcactcccagtcatttatgacagtgggaacctgttcactgtcaccaatgcattcattacagtgggaacttattcctgtcacccactcattccttacaggagaaacttcttcactgttacccactcattcattacagtgggaacctgttcactgtcagccactctttcaccacagtgggaaactgttcactgtcacccactcattcaccacagtagaaatctgctcactgtcacttactcactcatcaagtgagaacctgttcactgtcacccacccattcaccacagtagaaacctgctcactgtcacttactcatcaggcgagaacctgttcactgtcccccactcattcatcacagtgggtacctgttcattgtcacccattcattcattatgggaggaacctgatcctgtcaaccactcattaatcacagtagaagccagttcactgtcaccaactcactcaccacagtgggaacctgttcactgtcagccactcattcatcacagtgggaaacagttctctttcagccactcaatcaccacagtgagaacaatttcactgtcaccccctcattcacagcattaaaaacttgttcactatcagccagtctgtcaccagagtgggaacttgtctactgtcagcgactcactcatcacagtgggaacccactcactgtcactcacttattaatcacagtgggaacctgttcaatgtcacccacttattcatcacaggggaacctgttcactttcacttaatcattacagaaggaacctgttcactgacaccaacacattcatcacagtggaacctgttcactgtcacccactcactccccaacgtggttacctcttcacagtcacccactcaatcattacattgggattctgtttactgtcacccattcattcattgaaaaaagaacctgttcactgtcagccgctcattcatcacagtgggaacccgttcactgtcaggcactcattcaccaaagttaaccgtttccctgtcacccactcgttctccgaaacagaaatttgttccctgtcacccactcactcatcccagggagaacctgttcacagacagccactcattcctcctagtgggtacctcttcactgtcacccactcattcattacaggaggaacctgataactgtcactgacctgttcactagagtaggaaccttttcacagtcagtcactcattcatcatagtgggaacctgttttccatcagccactcactcaccacagcaggaaccatttcactgtcacctactcattcatcgctgtagaaaccttttcactgtcagccacgcagtcatcagagtggaatctgtttactgtcagtcacttagtcatcacagtgggaacctgttcattgtcattcactcattcatcactgtgggaacctgttgaatgtcacccattcattctccacagtgggaaccacaacactgccatccactcattaatcacattgagaacctgttcactgtcaccaagtcattcattacaggaggaacctgttcactgtcacccgctaattcttcacagtgaaaaccaattccatatcacacactcactcaccgcagtgggagtctcttcagtgtcacccattcacttatcaaagtgggaacctcttcactcttacccactcatttaccacggtgagaacctgttcattgtcacccactcattcatcacagtgggatcctgttcactgtcacccacccattcattacgggaagagcctgttcactgtcacttattcattcatcagagtgggaaactgttcactgtcagcaactcattcattacagtgggaacatgttcactctcacccactcattcactacagcagaaacctgttcagttaccttctcactcatcccagtggaaatgtcttcattgtcagccactcattcatcacagtggatacctgttcacagtcaccttctccttcattacaagagaaacctgatcactgtcacccactcgttcatcacagtagaaatatattcactgtcaccatctaattcaccacagtgggaacctgttccctgacagccactcattccacagtgggaaactgttcactctcacccactcattcactacagtgggaatctgttcactgtcacccactcattcactacagtgagatcctgttcactcacatgcactcactcatcacagtgggagcctgttcactatcagccacagtgggaacttgattactctcaccaactctttcaccacagtgggaaactgttcactctcatccactcatttaccacatcaggaacctgttgattgtcacccactcattcatcacagtaggaaactgttcactgtcacacactcatttatcacagggggaacatggtcactctcactcattcattcaccacagtggagacctgttcactgtcacccactcattcactacagtgagatcctgttcactcacacgcactcactcatcacagtggcaaccgattcactctaaaccactcattcaccacagtgcgaattcgttcagtgtcagccaatcacgcatcacagtggtaccctgttcactgtcgggttgtcattcaccagagcgggaatctgttcactctcacccactcattcaccatatcgggaacctgttgattttcacccactcattcatcacagtaggaacctgttcactgtcacacactcatttatcacagtgggaaactgttcactctcattcactcaccagagtgggaacctgttcactctcacaaactattccaccaaagtgggaacctgttcactctcacccactcattcaccacatcgggaacctcttgtcatccactcattcatcacagtaggaacctgtttactgtcacacactcatttatcactgtgggaacctgttcactctcactctctcactcatcacagtggaaacctgttaactctcagccactcattcaccacattggaaacctattcactgtcacccactcattcatcacagtgggaacctgttaactgtcacccacccttcattacagaaggaacctgttcactgtcacccactcatttatctccagtgggaacctgctcactgtcagccactcattcatcacaatgggaacctgctcactgtcacccactcattcatcacagtggaaacttgttcactctcactcacacattcatcagattgggaacctattcactggcacccactcactcatcatagtaggaacctgctcagtgtcacccactcactcacaagtgtgaaaacctgttcactgtcagtccatcattcatcacattgggaacctgtaaactgtcagctactcattcatcacagtgggaaccttttcactgtcacccactcattcatcacactggcaagctattcattgtcatccactcactcatcacagtggaaagctgttcactgtcatccaatcactcatcatagtgggaacctgttcactctcagccactcattcaccacagtgggaacctattcactctgacccactcagtcaccatgtggtaatctgttgactgtcacccactcattcatcacagtgggaaccttttcactgtcattcactgattcatcacagtgggaacctgttcactctcacatactcactagtcacgttttgaacatgtgcactgtaagccactcgttcatcacattgagaacctgttcactctcacccacttattcaacacagtgggaacctgttcattgtcacccacacattcattacaggaagaacttgttaacagtaacacactctttcatcacagtgggaaactgttcactgtcagccattcattcaccacagtggtaacctgcttactgtcagccactcactcaccgcagtgaaaacctgttcactgtcacccacctgatgacctgagtagaaacttgtttacttgcagtcactcattcaccacagtgggaaatttcattgtcacccactcattctcaaaagtgggaaccagttcgctgtcacctacttgttcaccgcagtcgaaacctgttcatggtcagccccatggtgatgacagtgggaacctgtttactttcagccactcattcaacaaagcaggaaccagttctttgtcacccactcattcatcacagtgagaacgtgttcactgtcatccgctcattcatcacagtgggaactagttcactgtcaaccactcactcatctcagtgggaacctgttcactgtcattcactcattcatcacagtgagaacatcctgtatttcagccactcattctccactgtgggaacaagttcactgtcacccactcattcaccttagtaggaacctgttcactatcagccactcagtcaccacagtgggaaccattttactgtcagccagtcactcatcatagtgggaacctgctcactgtcactttctcattcttccctgcgggaacctgtttactgtcacccactgattcaccacagtgggaacctgttcactgtcactcactcattcattacagtggaaaactgttccctgtcacccacgcactcattacatgaggaacttgttcactgtcacccactcattcatcacagttggaatctgttcactctcacctatgcattcaccacagtgggaaaattttaactgttacccactcattcatcaaagtgaaaacctgttcactctcacccactcatttacgacaatgggaaccagctcactgtcacccacctgttcatcacaatgggaacctgttcactgtcaaacactcatttattgcaggaagaacctgttcactgtcacacactctttcattacactgggaacctgttcactgtcacgcactcattcattagagttggaacctggtgactgtaacacacacattaattgcagtgggaacttattcactgtcagtcactaatttgccacagtgggaaccagttcactgtcacccactagttaaccacagtagaaacctgttaacagtcagcaactcactcatcacagtgggaagctgttccgtgttagccactcattcatgacagtgaatacctgttcactgtcacccacttatttatcacaggagtaacttaattactgttacccacgcattcaccacagtagaaacctgtacactgtcacccactcattcgccccagtgtgaaccggttcaatatcagccactcattcatcacagtgagaacctgttccctgtcagcttctcattcatcacagttggaacctgttcactgtcacccactcattcaccaaagtgggaaactgtttactgtcactcacttattcatcacaatgggaaccttttcactgtcacccacacattcattacatgaggaacctgttcaccatcacccactcattcattacagtgggaacctgttcactgtcagccactcattcacaagagtgggaacctgttcactgtcaccaactcatttaccacagcagaaatctgttcactgccaccaacttactcatcacagtgggaatctgtacactgtccgccactcattcatcacagtgggtacccgttcactgtcacccactcattcattacagaaggaacctgctcattgtcacccactcgttcaccacagtagaaacttgttcactgtcacccacacattcaccatattgggaaagtgttcactgtcagccactcaatcatcacactggaaacctgttcactgtcagacactgattcaccatagtagcaaccagttcactgttacccactcattcaccacgatggaacctcttcactgtaagccacttatttatcacagtgcaaagctgatcactgtcagccactcatttacctcagtagaaaccagtttactgtcacccactcaccacacttggaaactgttcactgtcactgagtcactcatcagagtgggaacgtgtttactgttacacactcattcatcacaatgggaacctgttcaatgtcagccactcattcaccacagtgggaatttgttcactctcattcacacattcaccagagtgataaccttttaactgttagccactcattcaccacagtgggacctgttcttttcacccactcattcatcactgtgagaaccagttcactctcatcaactcactcatcacattgggattctgttcagtgtcagccactcattcatcacagtgtgaaactgctcactgtgagtcatgcattcaccacagtggcaccctgttcactgtcaccaactctttcaccacagtaaaaacctgttcactgtcacacactcactcatcactgtggatacctgttcactgtcagacactcattcatcacagggggagcctgttcattttcaccagcgtattgatcacagtggaaacctgttcagacactcattcaccatagcggaaaacagttcagtttcactcacttgtttaccgcagtagaaacccgtacattgtcagccactcagtcaccactgtgggaacttgtttattgtcagccactcagtcatcacgtgaaaaattgtttactgtcacccactcattcatcacagtgggaacctgttccacgttaccccaccattcaccacactgggaaactcttctctgtcgtcctcccattcatcagagtgggaacgtgttctatgtcatgcactcattcattacaccagaaacccgttcactgttacccactcattcttcacagtggaaacctgttcactgtcacccactcatttaccacagtgggaacctgttcactgtcagtcactaattcatcacactaaaaacttattcactgtcagccactcattcatcactgtgggaacgagttcactgtcacccactcattcatcacagtgagaacctgttcactgtccccacctcatgcatcacagtggtaacctgttcactgtcacccactcactcaccacagtgggtacgtgttcactgtcacccactcattcaccacagcgggaacctgtaaactgtaacacactcagtcatcacagtaggaacttgttcacttttagccactcattcacctcagtgggaacctgttcactgtcacccacacatttatcacagtagaaacgttttcactgtcaaccactcactcatcagagttaagaatctgttcactgtcagccactcactcatcacagtgggtacctgttcactgtcaaccactcactcatctcatcgggaacctgttcactgtcacccagtcattcatcacagagggaacatgttaaatgtcagccactcattcaccacagtgggaacttgttcactgtcactctttcaccacagtgggaacatgtcccctgtcagccactcattctccacagtaggaaccggttcagtctctccaactcacttatcatggttggaaacttttcactgtcaccctctcattgaccacattgggaacctgttcactctcacctactcactcattacaatgagtacctgttcaatgttagccactcattcaccacagtgtgaacctgttcagtgtcacccactcactcatcacaatgagaacctgttcactgtcacacactcaccacattgggaaccatatcactctcacccactcattcaccacagtgggagcctgttctctgtcacacacttatttatcagtgtttgaacctgttctctgtcacccactcactcatcagagtgagaacttgtttgctgtcacccacttaataaccacactgtgaacctattcatggtctcacactcactcatcacagtggaaaactgttcactgttaccacacattcaccagagtggggaacttttcactgtcaggcacgcaatcaccacaatgggaacttgttcgctctcacccactcactcaccaccctgggaatatatttattgtcacccacttattcatcaacgtggaaacctgttcactctcacccactcatttatgacagtgagaaccagttcactgtcatccacctattcatcatagtggaaacctgttcactgtcacccactcgtttattacagaaggaacctattcactatcacacactcatcacagtgggaacctgttcactgccaagcactcattcattacagaaggtacctgttgactgtgattcacacattcatcactgcgggaacttgttcactgtcagtcactcattcaaaccagttcactttcacccaccagaccaccgcagtagaaacgtgttcagagtcaccaactcactcatcagagtggaaacccgttcagtgttagccactcattcatcacagtcaacacctgttcactgtcacccacttattcattacaggaataacttaatcaccgccacccccttactaattacagtagaaacctgtacactgtcatacacttatttaccccagtgggatcatgttcactatcagtcagtcactcatcacatgtgaacctgttccctgtaagccactcattcaccacagttggaatgagttcgctgtcaccatctccttcaacttagtaggaatctgttcaccatcagccactcagtcaccacagtgggaaccaggttactgtcagccactcactcatcacagtgagaacctgctcactgtcaccctctcattcctcacagtgggaacctgttcactgtcacctactcattcaccacagtgggaacttgttcactatcacccactcattcaccacagtgggatcctgttcactgtcactcattcattcatcacagtgggaacctgttcactgtcacccacgcattcattacatgaggaacctgttcattgccacccactcatttatcacagtgggaacctcttaactataaaacacacattcaccacagtgggagcctcttcactgtcacccactcattcttcatattgagaacctgttcactatcacccattcattaattacaggagaaacctgttcactgtcacccacttattcatcactgtgagaacctgtttactgtcacccagtcactcaccaaagtgggaaagtgttcactatcacccacccattcatcatggtggaaacttgttcactgtcgcccactcattcaccacagtggttacatgttcactgtcacccactcattcatcaaagtgggaacctctttacagtcagccactcattcacaacagtgggaacctgttgcctgtcagccactcattcattacagtgggaacctattcactgtcaccgagttattcattacaaaaaaaccctgatcactgtcacccactcgttcaccacagtagaaacctattcactgtcaaccactgtcactccagtggaaacctgttcactgtctgccacttgttcaccacattgagaaccagttcactgtcaataactcactcaccactgtgggaatctctttgtcacccactcattcaacacagttggaacctgttcactgtcaccctctcatccattacaggggaaaactgtttactgtaactccctcattcatcacagtgagaacatgttcactgtcacccagtcactcaccacagtggcaacctattcactgacacccactcactcatcatcatgggaacctgttcactctcacccactcattcactacggttggaacatgctcattctcaccacctcatgcatcacagtgggaacctgttcactgtcaggcactcttttaccacagtgggtacctgttcactgttacccactcactcttcacagtgggaacctgttcactgtcaccaacttattcattacagtaagaaccttatcactgtcaacgacatattcaccactgtaggaacctgttcactctcatcaattcattcaccacaatgtgaacgttttccctgtcagccaaccattccccagagtgggaagctgttcactgtcacccactcattcatcacagtgtgtacccattaactataagccattcatgcatcctgatgggaacttcttcactgtcacccacacactcattacaacctgatcaatgtcaaccattcactcaccaaagtgggtactagttcattctcaaccactaattcatcacagtgtgaacctgttcattgtcacccaatcattcattacaggaggaacctgttcactgtcacccacaaagtcattagattgggaacctgttcactgtcacacactcatccatcacagtggaaacctgttcactgtcaagcactcattcactactgtgggaacctcttcattgtcaacgactcactcaaaactgttggaacctgttcaccgtcacccattctctcattacagtgggaacctgctcactgtcgtcctctcattcatcacagtaagaacctgttcactgtaaaccacatactcacaactgtgggaacctcttcactctaaatcactcattcaccacagtgagaacaagttctacatcagccacttattcaccatattgggaacctggtcactgtcaccactaattcatcacagtcagaacccgttcactataagccactcattcatcacagtgggaacctgttcactgtcatccactcactcatcactttgggaacatattcactgtcagtcaaacattctccacagcaggaaaccgttcactgtcatgcactgtttcattacagttagaacctgttcattctcacccacttactcatcaggatgggaactttcactgtccacctttcactcaccacagtgggaacatgttcactctcacttacacattcaccatagtgggaacctgttcagtgtcaggcactcattaatcacagtgggatcctcttcactgtcagctattcactcaacacattgggaacctattcactgtcacccattcatcacagtggaaacctgttcactgtcagccagtcattcaccacagggacaacatgtccactttcagccacacattcaccacagtgcgaacctgttcactatcacccactctttcattaccgtgcaaacctgttcgttgtcacccaatcattcattgtgggaagaacctgttcactgtcacccacaaggtcattagagtgggaacatgttcactgtcacacactcattcatcatagtggaaacccgttcactgtcaagcactcattcactactgtgggaacctgttcactgtcacccactcactcaaaactgtcagaacctgttcactgtcacccactgtctcattacagtgggaacctgctcactgtcaccctctccttcatcatagtaagaacctgttcactgtaaaccacacactcacaactgtgggaacctattcactctaaaccactcattctccacagtgagaaccagttctatgtcagccactcattcaccacagaggaaacctgctcactgtcacccactcattcatcacagtcagaacccgttcactataagccactcattcatcacagtcggaacctcttcactgtcacccactcactcattacagtgggaacctgttccctgttgaccactcattcaccacagtgggaacctgttcattcacacccactcaatcatcacagtgggaacctcttggctgtcaagcactcactaaccacagtgagaatctgttcatactcacccactcacttaccactgttaaaatctgttcactgccacccattccttctctcagtgagaacctgttcactgtcacccactcactcattagagtgggaacctgttcactgtcacccacttatacatcaaaattgtaacctgttcgctgtcacccactcactgatcaaatcaagaatgtgtcaaaagtcacccagtcactcatcacagtttgaatcttttcgctgtcactcactgactcatcacaatgcaaacggattcactgccaccactcattcatcacagtgggaagctgcacattgtcactcaataatttatcacagttggaacctgttcactgtcaccccactcattcatcacactgcagcctatttattgtcacccactcactcctcataatgggaacctgttcactgtcacccactcacacaccatagtgggaacctgctcactgtcagccactcattctccacagtgggaacgtgtccactcccacccactcattcacgacagtggggaatctattgattgtctcccacccattcatcacagtggtaatctgttcgctgtcacacacacattcatcaaagtgggaacctgttcactgtcatccattcacttatgacagtgagaaacttcactgttagccactcattcaccacagtgggaacattttgtctctcacccaaacattcaccacagtggcaacccgtttactatcacccactaaatctttatggtgggaacctgttcactgtcacacactcattcattacaggaggaacgtgtttactgtcacctactcattaatcacagtgattaatcacattaaacctgtttaatgtcagccactcacttcccacagtggaaacccgttcactttcagccactcactcccaatagtggaaatttgttcactgtcacccactcattcacctctgtagaaacctgttcactgtctcccaattattcgccaaagtgggaaccagttcacggtcacccactcataaatcacactgggaaactgttcactgtcgcccactcattcatcactgtggtaacctattcattgtgagccactcgtttatcacagtgggagccattttactctcacccactcatcgagagcagtgggaagtagttcattgtcattcactcgttcactgcacgagaaacctgtgcactgtaagccactcagtcaccacaaagagaacctgtttaatttctgccactcatccaccacagtgagaatcactgtcattcactcattcaccacagtgagaacctgttcactgtcacccacacattcatcacagtgggaacctgttcactgtcacccactcactcatcgcagtgagaacctattcattatcagacacacattcaacacagtgggaatcttttcactctcactcactcattcaccaaagtgggaccctgttcactatctcccacttattcattaatggaggaacctctttactgtcagcaagttattcattacagtgggaacctgttcactgtcactcactcgttaaccgcagtaaaaacctattcactgtcagccatacgttgaccaaaatgggaacctgtttagcgtcacccacttattcatcacagttgggacctattcactgtcgcccacacattcaccacagaatgaacctgttcactttcaaacactcattccccacagtggtaatcagttctctctcacctactcattcaccacagtgggaaccatttcaccttcaccctctcgctcaccacagtataaacctgttcactgtcagccactcagccactacgattggaacctgtttactctcaggcactcattcaccacagtgggaaccattcactgtcacccactcattcatcacagtgggaacctcttcactgtcacacagtcatttattacagagggaacctgttcaccttcatggactcattcattacagaaggaaagtgttcactgtctcccactcattcattacagtggaaacctgatcactgtcacccactcactcacctctgtgctaacctgtcactgtcagtctgtcactcatcacagtggaaatctgttcactctcacccactcattcaccacattgggaacctgttcaccttaaccagtcactcatcacactgggaagctcttcactgtcacacattcattcttcacattgggaaccagttcactttcacccactcattcaccacagtgtgaacgtcttcactgtaacccactcattcatcagagtgggaaccatttcacagtcactcacacattcattacaaaaggaaactgtttgatctcacgcactcactcatcaaagtgggaacctgttcactgtcacccacttactcactagagtgtgaacctgttcactgtcagccactcattcatcacagtggcagcctactcactgtcagccactcactcaccacagtgggaaccagttcactgtaacccactcgttaaccgcagtaaaaccctgtttactgtcagccactcaggcaccatactgggaacctgtttgctgtgagccactcatccaccacagtgggaagcagttcactgtcacccactctttcatctctgttagaacatgttcactgtcaaccactcatacctcacagtgaaaacctgttcactgtcacccacgcactcaccacagtaaaaacctgttcactgtcaccatctcattcaccacaatgaaaacctgttcaatgtcagccacacattcactacagtgggtacctgttcactgtcagcccctcactcatcacaatgggaaccagctaactgtcacaaactcattcatcacagtgggaaactgttcactatcagccactcattcaccacaaggggaacctgttcggtttcagccactcattcaccactgtgggatcctgttcactgttacccattcattcatcacagtgcaaactttttcactgtttcccactcattaattacaagaggaagcttttcactgtcacccactcattcatcaccatggaaacccgttcactgtcacccacttattcatcacagtgagaacctgttcactcgcccacttgttcaccacattgggaagctgttctcagtcagccacccactcaccacagtgggaacctgttcactgtcacctactcactcatcacagtgggaaaatattcattgttgcccactcactcatcagcttgggaacctgctcactgtcagccacccaataaccacagtgggaacctcttcactctcacccactcattcagcacagtgggaaacttctgactgtcacccactctttcatctctgttagaacatgttcactttcacccactcattcctcacagtgaaaacctgttcactgtcacccactcactcaccacagtaaaaaccttttcactgtcaccatctcattcaccacaatgaaaacctgttcaatgtcagccacacattcatcacagtgggtacctgttcactgtcagcccctcactcatcacaatgggaaccagttaatggtcacaaactcattcatcacagtgggaaactgttcactatcagccactcgttcaccacaaggggaacctgtttactttcagccactcattcaccacggtgggacgctgttctctgttacccactcattcatcacagtgcaaacttgttcacagtctcccactcattaattacaagaggaaacttttcactgtcacccactcattcatcaccatggaaacctgttcactgtcacccacttattcatcacagtgagaacctgttcactcgcccacttgttcaccacattgggaagctgttctcagtcagccacccactcaccacagtgggaacctgttcactgtcacctactcactcatcacagtgggaaaatattcattgtcacccactcactcaccagcgtgggaacctgttcactgtcagccacccaataaccacagtgggaacctattcactctcacccactcactaaccacagtgggaatgggtttaatgtcagccactcattcaccacagtgggaacctattcactctcacccacacattcaacacattgggaacctgttgactgtcacccacccattcatctcagtgggatcctgttaatggttacctacacatttatcacagtgggaacctattcactctcacccacacactcatcacagtgagatacttttcatggtcaatcactctttcaccacagtgggaacctgttcactctcacccactcatacatgacaatggtaacttgttaactgtcacccactaacttatcacagttggaaagttttaactgtcacccattcactcatcacagtgggtacctgttcactgtcacccactcactcatcacagtgggaacctctttactgtgagctactcattcctcacagtgggaacctgttcactgtcacccactcattcaccactgtgggaaacacttcactgtcacacactcattcatcagagtgggaaccctgttcacagtcactcacacattcataacaaaaggcaactgttccctctcatgcaatcactcatcacagtggaagcctgttctttgtcacccacttattcaccagagtgggaacctgttcactgtcagccactcattcatcacagtggaaacctattcactgtcagccactcattcaccacagtgggaacctgttaactctcccccactcactcatcacagtgggaacctgtttatggtcaccaacacatacatcacagtaagacccttttcagtgtcaaccacacattcaccactgtggaatcctgttcactctcacccactcattcattacaacgagacccttttccctggcagccactcatttcccacagttggaacctgttcactgtcacccattcattcatcacagtggaaacccgttaactataagcaactcattcatcacagtgggaacctcttcactttcacccacacactcagtacaatgggaaccagatcaatgtcacccactcactcaccacagtgggaacttcttcattctcaaccactcattcatcacagtgagaacctgttcactgtcacccactcattcatcacagtggaaacgtgttcactgtcatccacacactaattacaatggaaacctgttctctgttacccactcatgcatcacagtgatacattttctctgtcaccaactcactcataacattgggaacatgttcactctcagtcactcattctcctcagtgggaagcagttcactgtcacgcactgatttatcacagtgagaacctgttcactgtcagccactcattcaccacagtgtgaacctgttcactgtcacttactcatccaccacagtgggaacctgttcattgcccactggttcattacagaagaaacctgtttactctaacccactcattcaccacactgagaacctgttccatgtcagccacttatttactacagtggcaacctgttcactgtcaacattcatcagagtagaaatccgttcactataagccactcatttatcacaatgggaacctcttcactgtcacccactcactcattataatgggaacctgttcactattaaccacttgttcactgtcacccatacattctcaaagtggggacctgttcactgtcagccactcactcattagagtgggaaccctttcactgtcttccactcattcataacaattgtaacctcttaactgtccagcactcactcatcacatcaggaacctgttgaaagtcacccactcactcatcacaatgggaatctgttcaatatcacccacttactcatcacagtgggaatgtgttcactgtcagcaactcattcatcccagtgagaagctgctcactgtcacccactcttttatcatagtggggacctgttcactgtcacccactcattcatcacactgggaatctatatattgtcacccattctctcatcataatgggaaccttttcactgtcatacactcacacaccatagtgggaacctgttcactgtcagtcattccttcaccacagtaggagccttttccccctcaccctctctttcaccacagtgggaatctgttgattgtcacctaatcattcatcacagtgggaacctgttcactgtcacccacattttcatcacagtgggaacctgttaactttcaccaactcattcatcacagtgggaacccattcactgtcagccatacattcaccacagtgggaacattttcactctcaccaaaacattttccacagtgtaaacatgttcactgtcacccactgaaccatcatggtgagaacctgttcactgtcacacactcattcattacaggaggaacgtctttactgtcaccaactcattcatcatggtgggaacctgttcaatgtcagccactcattcaccacagtgggaacctgttgactgtcaggcactcatttcccacattgggaacctgttcactgtcatccactcgttcaccatagtagaaacctgttcactatcaccaacttactcaccaaagtgggaacatgttcactgtcacccactaatttatcaaagtgggaaactgttcactgtcgaccacacattcaccacagtggtaacctgttcactgtcagacattcattcatcagaatgggaaccatttcactgtcacccactcattcaccacagtgggaagtaatttactgtcaaccactcgttcaccgcagtagaaacctgttcactgtaagccactcagtcaccacagtgggaacctgtttacagtcagccactcattcaccacagtgggaaccagtttactgtcattcactccttcactacagtggaaatctgtttactgtcacccacacatttatcatagtgggaatctgttcactgtcactcactcatcacagtgagaacctgttcatggtcagccattcattcaccacattaggaatcttttcactctcacccactcattcaccacaatgggaaactgctcactgtctcccacttattcattactggacgaacctctttactctcagtaacttattcatcacagtaggaacctgttcactgtcagccacccattaaccacagtgagaagctgttcactgtcagccactgacacatcacagtggcaacctgttcactgtcacccacacagtcaccacagtgaaaacctgttcattgccaccaactcaattgccaccgtggaacctgttcactctcacccactcatacatcacagcggtaacttgttagctgtcacccactcactcatcacagtagatacctattcactgtcactcacttactcatcacagtgggaacctgttcactgtcagctgctcattcttcacattgggaacctgttcacagtaaacccctcattcatcaccatgggaacctgttcactgtcacccactcatgcatcacactgggatcctattaattttcacccactcactcatcacactgggaacctgttcactgtcactcactcaatccccagagtgggaacctgttgactgtcagccactcactcaccacagtgaaaacctgtttattctcacccactcattcaccacagtggaaacaatttaactgttacccactcctgcatcacaatgggaacctgtcactgtcactcactcattcatcacagtgggaacctgtcactctcaaaaactcagtaatcacagtgggaacctgttcactgacagccactcattcaccattcaccacgatgggaagctgttcactctcacccattctttcaccactgtggaaagcttttcttttttatttttttattattattattattatactttaagttttagggtacatgtgcacaatgtgcaggttagttaaatatgtatacatgtgccatgctggtgtgccgcacccattaactcgtcatttagcattaggcatatctcctaatgctatccctccccccactcccaccccacaacagtccccagagtgtgaagttccccttcctgtgtccatgtgttctcatagttcaattcccacctatgagtgagaacatgcagtgtttggttttttgtccttgcgatagtgtgctgagaatgatgatttccaatttcatccatgtccctacaaaggacatgaactcatcattttttatggctgcatagtattccatggtgtatatgtgccacattttcttaatccagtctatcattgttggacatttggcttggttccaagtctttgctattgtgaatagtgctgcaataaacatatgtgtgcatgtgtctttatagcagcatgatttatagtcctttaggtatatacccagtaatgggatggctgggtcaaatggtatttctagttctagatccctgaggaattgccacactgacttccacaatggttgaactagtttacagtcccaccaacagtgtaaaagtgttcctatttctccacatcctctccagcacctgttgtttcatgactttttaatgattgccattctaactggtgtgagatggtatctcattgtggttttgatttgcatttctctgatggccagtgatggtgagcattttttcatgtgttttttggctgcataaatgtcttcttttgagaagtgtctgctcatgtccttcacccactatttgatggggttgttagttttttcttgtaaatttgtttgagttcattgtagattctggatattagccctttgtcagatgagtaggttgcgaaaattttctcccattttgtaggttgcctgttcactctgatggtagtttcttttgctgtgcagaagctctttagtttaattagatcccatttgtcaattttggcttctgttgccattacttttggtgtttgagacatgaggtcctcgcccatgcctatgacctgagtggtaatgcctaggttttcttctagggtttttatggttttaggtctaaagtttaagtctttaatccatcttgaattgatttttgtataaggtgtaaggaagggatccagtttcagctttctacatatggctagccagttttcccagcaccatttattaaatagggaatcctttccccattgcttgtttttgtcaggtttgtcaaagatcagatagttgtagatatggggcattatttctgagggctctgttctgttccattgatctatatctctgttttggtaccagtaccatgctgttttggttactgtagccttgtagtatagtttgaagtcaggtagcatgatgcctccagctttgttcttttgacttaggattgacttggtgatgcgggctcttttttggttccatatgaactttaaagtagttttttccaattctgtgaagaaagtcattggtagcttgatggggatggcattgaatctataaattaccttgggcagtatggccattttcacaatattgattcttcctacccatgagcatggaatgttcttccatttctttgtatcctcttttatttcattgagcagtggtttgtagtactccttgaagaggtccttcacatcccttgtaagttggattcctaggtattttattctctttgaagtaattgtgaatgggggttcgctcatgatttggctctctgtttgtctgttattggtgtataagtgtgcttgtgatttttgtacattgattttgcatgctgagactttgctgaagttgtttatcagcttaaggagattttgggctgagacaatggggttttctagatatacaatcatgtcgtctgcaaacagggacaatttgacttcctcttttcctaattgaatacactttatttccttctcctgcctaattaccctggccagaacttccaacactatgttgaataggagtggtgagagagggcatccctgtcttgtgccagttttcaaagggaatgcttccagtttttgcccattcagtatgatattggctgtggctttgtcatagataggtcttattattttgagatacgtcccatcaatacctaatttattgagagtttttagcatgaagtgttgttgaattttgtcaaaagccttttctgcatctattgagataatcatgtggtttttgtctttggttctgtttatatgctggattacatttattgatttgtgtatattgaaccagccttgcatcccagggatgaagcccacttgatcatggtggataagctttttgatgtgctgctggattcggtttgccagtattttattgaggatttttgcatcaatgttcatcaaggatattggtctaaaattctctcttttggttgtgtctctgcccggctttggtatcaggatgatgctggcctcataaaatgagttagggaggattccctctttttctattgattggaatagtttcggaaggaatggtaacagttcctccttgtatctctggtagaattcggctgtgaatccatctggtcctggactctttttggatggtaagctattggttattgccacaatttcagagcctgttattggtctattcagagactcaacttcttcctggtttagtcttgggaggttgtatgtgtcgaggaatttatccatttcttctagattttctagtttatttgcgtagaggtgtttgtagtattctctgatggtagtttgtatttctgtgggatcggtggtgatatcccctttatcattttttattgaaaatgatcatttttattgaaaatgataaaggagatattaacctgttaactttcagccactctgttatcacagtgggaacctctccactgtcacctaataattcatcacagtgggaacctcttcactgtgagccacttattccctgttgtgggaacctgttcactctcaatctctaattcaccacagtgagaatctgctcactgtcagccactcagtcatcacagtgggaaccagttcactgtcacctactcgttcaccgcagtagaaacttgtttactgtcactgatacacgcatcacagtggaaacctgtttactgtcagccactcattcaccacagtgggaaccagttcgctgccacccattccttcatgaaaacgagaacctgttcactgtcacccactcattcctcacagttggatcctgtcaccatcattcactcactcaccacagtgggaacctgttcactgtcacccactcattcaccagagtcttaatctgttaactttcatccactctgttatcacagtgggaacctgtcccctgtcacctaatcactcatcagagtgggaacctcttcactgtgagccacttactccctgttgtgggaacctgttcactctcaatctctaattcaccacagtgagaatctgttccctgtcagccactcgttcatcacactggaaccagttcactgtcacctactcattcaccgcaatagaaacttgtttcctgtcaccaaaacacgcatcacagtggaaacctgttccctgtccaccactcatccatcagagtgggtacttgttcactgtcacccactcgttcattacaggggaaacttggtctttgtcacccactcttttaccacagtagaatccttttcactgccacccactcattcaacacagtgggaacctgttcactgtcagccgctcattcatcacattggtaacctgttcactgtcagcgactccatcaccacattgagaacctctttactgtcatccactcaccatcatagtgggaacctattcactttcacacactcattcagcagagtgggaacctgttcagtttcacatactcattcaccacagtgggaaactattcactgtcacccactcattcatcatagtgggaaccttttcactgtcacccactcattcatcatagtgggaacttttcactgtcacccactcattcattacaggaggatcctgtacactgtcatccactcattcatcacagtggaaaccggttcactgtcattcattcactaatcacattgcgaacctgtttacagtcacccactcgctcatcacagagggaacttgttttctttctcacactcattcaccacagtgggaaccttttcactgtcacccactaactcaacacggtggaacctgttaactttctcccactaattaaccacagtgggaatctctacactgtcacccactcactcatcacagtgggaacctgttcactgtcacccctcactcatcacaatgggaacttcttcactttcatccacccactcatcacagtaagagcctgtgcactgtcacctactcattcatcacagtgggaacctgttcagtgtcacccactcactcatcactgtgggaacgttttcactgtcactcactctttcatcacactgagaacctgtccattgtcagctactcactcaacacagtgtggacctgttgactgtcatcaattcactcaccacgatgaaaatcagctcactgtcagccacgcattcaccacagtacaaacctcttcactctctcccactcattcaccacaatgggaacctgctgactttcacacactcattcatcacagtgggaacctggtcactgtcatgtgctcatttatcacagtggcatgctgttcactgtcacatacttactcatcacagtgagaatctattaactattagccacacaatcaccgcaatgggaacctgttcactttcacctactcattcgccacagtgggaacatgtttactgtcactcactcattcatctcagtgggcagtggttcactgtcacccactcattcattacaggggtaacttgttcactgtcacccactcattcaccacagtgggaacctattcactaccagcctctcattcaccacaatgcaaacctgttaacaatcagccactcactcaccacagtggcaacattttcactgtcacccactcgtttgctgtagtagaaagctgttcactgtcagccacacatacaacacagagggaaccttttcactgtcagtcatgcattcatcacagtaacaacctgcacactgttgccctctcattcaccacattgagaacctgttcattttttagccactcattcattgcagcgggaacctgttcactcaccaactttttctccgcagttggaaggaattcaccatcacccactcattcacacactcttccaccccagtagaaagctgttcactgtcagccactcagtcatcacaatgggaacctgtttactatcagccacttgttcaccacagtgggaaccagttcactgttcacacactcattcatcacagcgagaacctgttcaatgtcaccccactcattcatcacagtaagaacctgttcactgtcaccaactcactcaccatgataggaaccagtttactgtcacccattcatttaccagagtggaaacctgttccttgccagccactcagtcatcacactgggaaactgttctcacccactcacttgtcacagtgggaaactcttcactgtgagccactcaatcactactgtgaaaaacctgttcactctgagtcactcgttcaacacagtgagaagctattcactgtcagccacatattcaacaagtaagaacctgtccactgtcagccattcattcacaacagtgggaaagtgttcactatcacccattcagtcatcacagtgggaacattttcactgtcaaaaactcattcatttcactgggaacctgttcactgggaacctgttcactgtcacccactcattcaccatagtggttacctgttcactgtctccaactcactcatcccagtgggaacctgttccctctcacccactcatttgccacagtgggaacctgttcactgtcacccactcatttatcacagagggaacatcttcactgtcacccattcattacaaaaggaacctgttcactgtcacccactcattcatcatagtgagaacttgttcactgtcagttgctcattcaccacagtgggaaccagttaactgtcaagcactcattcaccacagtagatacatgttcactgtcacccactcacacatcacagtggtatcctgttcactgtcagccactcactcatcacagagggtgccagatcactgtcacccactcattcattacaggaggaacctaatcactgtcacccactcgttcaccacagtagaaacctgttcactgtcaaccattcattcaccagagtgggaacctgttcactgtcagccactcattcaccacagtggaaacagttcactgtcacccatttgttcactgcagtagaaacctgcacactgtcagccacacagtcaccacagtggttacctgtttactgtcagccattcacttatcacagtgggaacatgttcactgtcacccaatcatttatcaaactgggaacatgttcactgccaccctctcattcaccacagtgggaacctcttcactgtcgcccactcactcattgcagtgggtacctgtttactgtcacaaacccattcattacaggaggaacctgttcactgtcaaccacatattcatcacagtcagatattgttcactgtcaaccactcactctccacagtgagaacctgttcactctcaaccactcattcaccacagtgggaaactgtccactgtcacacactcattcatcacagtgggaacatgttcactgtcatccactcattcattacaggaggtaccttatcactgtcactcactctttcacaacagtagaaacatgttcactgtcctccaatcactcaccacagtgtgaaccggttcactgtcagccattcgttcactactgtgggtacctcttcactctcacccacccatttagcacagtgagaaccttttcactgtcagccactcattcaccacagtgggaacctgttcactgtcacccattcactcatcacattgaaaatctgttcattgttacccactcactgaccacagggggaccggttcactctcacccactcatcacagtgggaacccgtttactgtcacacacgcattaatcacagtgggaacccgtttattctcacccactcacttatcacagtgtgttcttgttcactgtcagccactcattcaccactgtgggaagctgttccctctcaccaactcactcatcacagtgggtacctgttcactgtcacccactcactcagcacagtgggaacatgttctctctcatgaccgcattaacaatggtgggaacttgttcactgtcacccacacactcatcacattgggaacctgttcactgtcacccactcactattcacagtgggaacctgttcggtgcctttcactcattcatcagaatgggaacctcttcactttcacccactcactcatcacagtaagaacctgttcactgtcacccactcattcatcagggtaagaacttgttcactgtcactcactcattcatcacagtgaaaaccagttcacccttacccactcattccctacagttggaacctgttcactctcacccactaaatcatcaaagtggaaaccttttcactgtcacccacacattcatcacagtgcaaatattttcattctcacccactcattactatgggcaccgcttcactgtcagccacacattcactacagtgggaacctgtgcactctcgccaactcacccaccacagtgggaacctaattactgtcatcaactaactcaacacagtgggaaactgttcactgtcacccactcatgcataacaatggaaacctgttcactgtcagccacttcttcatcacagtgggaacatgttcatttaccacagtgggaagtggttcagtgtcacccattagttcactgcagtagaaacctgttcgttgtgaccaactcacttaccacagtgagaagctgtttactgtcggacactcaattcaccacagtgggaaccagttcactgtcacactctcattcatcacagtgagaatatgttcagtgtcacccactcaataacgacagtgggaagcagttcactgtcaccaactcattcaccacagtgggaacctgttcactctcagtccctcactcatcacagtgtgaacctgttcactgtcaccaactcactcatcacatttggaacttgttcactgtgagccacttattcactatggtgggaacttgttaactttcacccacatattcagcacattgagaacctgttctctgtcagaaactcatccgcagcagtgggaaactgttcactgtcacccaatccatcatcacactaagaatatgttcactgtaagccactcattcacttctgtgggaacctgttcactctcacccactcactcaccacagtaggaacttgttcaccctcacccactcactcatcactgtgggaacctcttcactctcacccacacattcgccacagtgggaacttgttcactgtcacccacttttcaatacaggaggaacctgttcactgtcaccaactcattcatcacagtgggaacctgttcactgtcagccactcattgagcacagtgggaacctgttcattgtcacccagtctttcacaatacaaacgtgttcactgtcacacactcactcatcacagagggtacctgttcatagtcagccactcattcgtcacagtcggtaactgttcactgtcacactctcattcattacaggaggaacctgattactgtcagtcattctacacagtaggaaacggttcactgtcagccactcattcatcacagtgttaacttcttcactgtcagccactcattcaccacagtaggaagaagttcactgtcacccactctttcagctcaatagaaatttgttcactgtcagccactcagtcaccaaagtgtcaagttgtttactgtcagcctctcactcatcactgtgtgaaactcttcactgtcaacaacacattcatcacagtgggaacctgttaactgtcacccactcattcaccacagtgggaatctgttcactctcaccaactcattcatcacagtgggtacctattcactgtcaccaattcacttaccacagtgggatcctgttctctctcacccactaattcaccacagtgggaaccagttcactgtcacccactcattcctcacagtgggaacctgttcactgtcactcactcattaataatatagtaaatagttcactgtcaccaactcattcaaggcagtgggaacctgttcactgtcacccactcactaatcactgtggaaacctgttaactgtcacccactcactcatcacagtgggaaactattcactgtttcccactcattcatcacaatggaaacctgttcactgtcacccactcactcatcacaatgggaaccggttcactgtcacccactcactcatcaaagtaagaacctgtggctgggcacagtggctcacgcctgtaatcccagcactttgggaggcttaggcgggcagatcacgaggtcaagagatcaaaaccatcctggccaatatggtgaaaccctgtctctaccaaaaatacaaaaattagccgggcatggtggtggatgcctgtaatcccagctactcgggaggctgaggcaggagaatcacttgaacccaggcagcagaggttgcggtgagccgagatcatgccattgcactccagcctgggcaacaagagcgaaactccgtctcaaaaaaaaaaaaaaaaagtaagaacctgttcactgtcatccactcactcatcagagagggaacctgtttgcccttacccactaattcaccaccgtgggagcctattcactcccacccactcagtcgtcatggtggaacttgttcactgtcacccacacattcatcatagtgggaacttgttcactctcaccaacccactcatcacaatggctactccttcactgtcagccactcatttatcacagtgggaacctgtgaactctcacctactccctcatcacagtggaacctgatcactgtcacagactaactcacaacaggtggaacctgttctctctcacccacttatttaccacattgggaacctgttcactgtcagccagtcattcatcacagtgggaacatgttcactgtcacccactcactcatcacagtgggaacctattcactgtcacccactcatttatcacagggggaaccagttcactgcaactcactgactcattacagtgggaaactgttcactgtcacccactcacttatcacagtggaaacctgctcaccatcagccactctttcataacattgggtacctgttcactgtcacccactcattcaccacagtgggaagcatttcaatgccacccactcgttcaccgcagtagtaatctgttcactgtcagccactcagtcatcagaacctgtttaccgtcagacactcattctcaacagtgggtacaagttgactgtcaccctctcattcatcacagtgagaacctatttcctgtcacccactcaccacagtgggaacctgttcactgtcacccattcattcaccacagtgggaacctgttcactgtcaaccactcactcttcagagtgggaaccggttcactgtcattaactcactcatcacattgagaatctgtctactgtgagccactaattcactatggtgagaccctgttcactctcaccaacccattcagcactgtgagaacctgttcactgtcagcaactcattcacaacagtgggaacccgttcaatgtcacccaatccatcatcacagtaagaacatgttcattatgagacactcattcactactgtgggtacaagttcactgtcaccttctcatcacagtgagaacctattcactgtcacccactcattcaccacagtgggaacctgttcactgtgagccactcactcttcacagtggcaatgggttcactgtcattaactcactcatcacattgggaacctgctactgtgagccacctgttcactatggtgcgaacctgttcactctcaccagcccattcatcacagtgaaaacctgttcactgtcaacaattcattcacaacagtgggaacttattccttgtcacccaatccgtcatcacagtaagaacatgtttattgtgaaacactcattcactactgtgggaacctgttcactctcactcacttgttcactgcagtagaaacctattcatgctcacccactcactcatcactttgggaaccagttcactcacccactctttcaccccagtgggaacctgttcactttcacccactcattcatcacagtgagtacttattcactgtcacccacccttatcacacgaggaacatgttcactgtcacccacacattcagaacattgggaatctgttcactgccagccactcattcaccacagtgggaacatgttcactgtcaaccttttatttaccacagtagaaacctgttcactgtcatcaacccattcatcacaatgggaacctgttcactgtcacccactcattcaccacagtgagaacctcttctctgtcatccacacattcatcacactgggaacctgttcactgtcacccactcattcattacgaaaggagcctcttcagtttcacccactcattcttcacaatgggaacctgttcaccttcactgccttattcaccatagtgggaacctcttctctgtcatccacacattcattacagtggaaacctgtttattgtcacccacccattcattacaaaagaaacttcttcactttcacacactcatttttcccaatggcaacctgctcactgtcactcactcattcaccacagtgggaacctgttcactgtcagccactcattcatcacggtggtaacatattcactgtcagtgagtcattcaccaaattgggaacctgttcactgtcacccactcgttcactgcattagaaacctgttcactgtcagccactcatttaccaacgtgtgaaactgttcactgtcacccgctcactcaccacagtgggaatcagtttactgtcacccactcattcaccacagtgggaacctgttcattgtcagcctctcactcatctcagtaggaacctgttcactgtcacacactcactcatcacagtgcgaacctgtttactgtcagccactcatgcactacagtgggaacctgttcactgtcacccactcagtcatcacagtgggaacctgttcactgtctttaactcattcattacagtgggaagctgttcactgtcacttactcattcaccacagtaagattctgttcactgtaactcagtcatcacagttggaacctgttcactgtcacaaactcattcattcctttgggaacctgttcactgctacccactcattcaccagagtgggaacctgttcactgtcaccgatacattcattacatgaggaacctgtttactgtcacccactcattcatcatagagggaaactgttcactgtcaatcactcactcaccacagtgggaacctgttcactatcacccactcattaatcacagtggaaacctgttcactgtcagccactcattcgttacagtggttacctattcattgttaaccactggtttaccgcagtagaaatctgttcactgccacacactcattcatcacagtgggaacctgttcacagtcagccattctttcttcacactcagtacctgatccttgtcacccatgcattcaatacaggaggaacctgatttctatcacacattcattcaacacagtagaaacctgttcactttccacattcattcactgcagtagaaaacggttcactgtcagccactcattcatcacagtgagaatgtcttctctgccatccacacattcatcatagtgggaacctgttcactgtaaggcactcatgtactaaaaaaaggaacctcttcacttttacccactcattcttcacaatgggaacctgttcaccttcacccgcttattcaccacagtgggaacctctttgttgtcagcctctcactcatcacagtgggaacctgttcactgtcacccactcactcatcacagtgtgaacctgtttactatcagccactcattcaccacagtgggaacatgttcactgtcacccactcattcactaaagtgaaaagttttcactatctctcactcattcaccacagtgggatccttttcactgtaacccactcagtcatcacagttgtaacctgttcactgtcacagactcattcattcctttgggaacctgttcactgtcacccactcagttatgacagtggggacctgttcactgtcacccacacattcattaaaggaggaacctgttcactgtcccccactcattcattacagttggaacctgttctttaccacccacacattcattacatggggtacctgttcactgtcacccactcatttctcacagtaagaaactgttcactgtcagccactcattcaccaccgctagaacaagttcacggtcacccacactttcaccacagtgggaagctgttcaatgtcacacagccgttcacagcagtagaaacctgttcactgtcagccactcagtcaccacaatgggaacctgtttactgtcagacactcactcatcacagtgggaacctgttcactgtctactcactcattcatcacattgggaacatgttcactctcaccaactcactcatcacagtgagaactttatcactgtcaccaactaactcaccacaggggaagcctgttctctctcacctactcattcaccacagcgggaacctgttcactgtcagccactcatttatcacagtgggaacatgttcactgttgtcaactcactcatcatattgggaacctgttcactgtgagccactcattcactacggtcacaacctgttcactctcacccacccattcagcacagtgagaacctgttcactgtcagcaactgactcacaatagtgggaacctctccactgtcacccaatccgtcatcacactaagaacatgttcactgtcagccattcattcactaacgtgggaacctgttcactctcacccacccattcaccacggtaggaacctgttcacactcagccactcactcatcactgcaggaacctgttcactctcacccaatcattcaccacaatgggaacctgttcattgccacctactaactcattacagtggtatcctgttcacagtcagccactcattcgtcacagtcagtacttgttaactgttacccactcattcattgaaggaggaccctgattactgccacccattcatccaacacagtagaaacctagtcactgtccccacacattcaccacggtgttaacctgttcactgccagcaactcactcactacagtgagaacctgttcactgtcaccgactcactcatcacagtgggaacctgttcaatgtcacccaatcactcatcacagtgggaacttgttcactgtcgcccactcactcatccctatgagaatctgttcactgtcacccactcattcaccacagtgggaatctgttcactctcaccaactcactcatcacagtgggtacctattcactttcagcaaactcactcatcacagtggaaacctgttctctctcaccaactcattcaccacagtggcaacctgttcactgtcacccattcattcatcatagtgggaacccgttcactgtcacgctctcactcatcactgtgggaacatgtttactgtcacccactcattcatcaatatgataaactcttcactgtcaccaactcactcatgacagtaagaaccagttcactgtcacccactctctaatcacagtagaaatctgttcactgtcacccactcactcatcacagtgggaaactgttcactgttttccactcgttcatcacaatggaaacctgttcactgtcacccactcactcatcacaacggaaaccggttcattgtcacccacttactcatcacagtaagaacctgttcactgtcacccactcattcatcacagtgagaacctgttcactgtcacccacacattcagcacagtgggaatatgatcactctcacccactcactcatcacagtgggtaccccttcactgtcagccactcattaatctcagtgggaacctgtgaactctcaccgactcactcatcacagagggaacctgatcgctttcacaaactaacttaccacaggggaacctgtcctttctcacccactcattcaccacattgggtacctgttcatggtcagccactcattcatcacaatgggaacatgttcactgtcacccactcactcatcacagtggaaaccagttcactgtcacccactgattcatcacagtgggaacctgttcactgtcacccatttttcatcacactgggaacctatacattgtctcccaaactctcactacagtgggaaacttatcactgtcatccactcactcatcacaatgggaacttgttcactgtcagccactccttcatcacggtgggaacctgttcactgtcacccacttattcatcacagttggaagctgtacgttgtcagccactcattcaccactgtgggaacctgttcaacctcaaccattcattcaccacagtggaaacctgttcactgtcagccactcattcatcacagcaggaacctcttcactttcacacactcattcatcacagttggaacctgtacactgtcacccactcattcactacagtgggagcctcttcactgtcaatcactcattcatcacagtgggaacctgttcactttcacacactctaatcacagcgaaactatcacccacttatccatcactttgggaacttgttcactgtcacccacttactcatcacagtggtaactggttgactgtcatgcactcacttattacagtgggaacctgttcactgtcgcccactcactcatccctatgggaacctgttcactgtgaatcactcattcatcactgtgggaacctgttcactctcacccactcagtcacctcagtgaaaacctgtacactctcagccactcattcaccacagtgggaacatcttcactgtcacccactcattcattacaatgggaacctgttcaacgtcacacactcattcattgccagagaaacattttcactgtcacccactcatttatcacagatgaaacctgttcactttcactcactcactcaccacaatgagaacctgttcactttcacccactcactcatcacagtgggaacctgctcattgttacccagtcatttatcacaatggaaacctgttcactctcacccactcactcatcacagtgggaacctgttcactgtcaccaacttattcatcacagtgggaacttgttcactctcaccaactcactcatcaaagtggttaccctttcaatgttagccacttattcaccacagtgggaatctgttcaccctcaccaactcactcatcactgtgggaacgtgttcactgtcacccactcactcaccacagtgggaagctgttctctcccacccactcattcaccacagtgagaacatggtcactgtcacccacgcattcatcacagttggaacctgttcactgtcacccactcagtcaccaccatgggaacccgttcactgtcacttagtcatttaccacattggaaaactgttcagtgtcacccacacattcatcacagtgggaacaagttgactgtcacccactcattcattagagtgaaaacttgttcactgtcacccactcactcaccacagtgggaacctgttcactttcatccactcatcacagtgaaaacctgttctctttcacccactcattcaccacattggataactgttcactgtcacccactcattcattacaggaggaaactgtttactgttacccactaattcaccagagtgggaagctgttcactctcacccattctctcttcacagtgggaacctgttcactgtcacccacatattcatcacagtgggaacctgttcactctcactaactcgctcatcacagtgggtacccattcactgtcagccacttattcaccatagtgggaatctgttcaccctcaccaccacactctttacagtgggaacatgttcactgtcacccactcactaaccaaactggaaacttgttctttcacacctactcattcacgacagtgagaacctgttctctgtcacccattcattcatcacagtgggaacctgttcactgtcactcagtcaccacagtaagaacttgttcactgtcacccactcatcataacaggagtaacctgtacactgtcacacattcattcattagagtgagaatgtgctcaatgtcacctgcttaatcaccacagtgggaacctgttctctgtcacccactcacccattacaatgaaatactgttcactctcacccactcattcgccacagtggaaaactgtgcactgtcacccacgcattcttcacagtggaagactgttgactgtcacccactcattcattacaggaggaaacgtttcactgtcacccacacactcatcataatgggaccctgttcactgccagccactctttcaccacagtgggaacctgttcactgtcacacaatcgttcaacacagtaaacacttattcactgtcactcactcatttatcatacaaggaacgtgttcactgtcacccaatcattcatcaaagtgggaaactgttcactgtcaggcactcattcaccacaatgggaacctgttcactgtcagccactcactcaccacagttggaacctgttcactttcactgactcactcatcagagagagaacctgttcactgtcaaccactcattcgccactgtgagaacctgttcactctcacccactcattcattacaatgagaacctgttcactgccacccacttattcaccacagtgggagcccgttcactgtcacatacacattcgtcacggtgtaaacctattcaccataaccaactcattcatcacagtggaaacctgttcactgtcaaccactcactcattactgtgggtacctgttctttgtcattcactttttcaccatagtgggaaccagttcaccctcacccactcattaaacacagtgggaacctgttcgctgtcaccactcattgatcacaatgggaacctgttgattgtcaacctctcattcattacaaggggaacctgttcaccgtcaccactcattcatcaaactgtgaaactgttcactgtcagacacccattcattacagtgggaaactgttcactgtcacccacttgttcactgcagtagaaatctgttcattgtctgcaacttactaagcacagttggaacttgttcactctcactttcttatacatcacagtgggaacttgttcactgtcaccaactcatcaatcacagtgggaacctgttctttttcagccactcattcatcacagtgggaacctattcactgtcacccctcactcaccaaagttgaaacctgttcactgtcacccactcactcatcaaagtgggagcctgttcactgtaaaccactcattcatcaaagtgggaacttgttcattgtcagccacttattcaccacagtgggaacctgttcactctcaaccactcattcaccatagtgagaacctgttcactgtcagcctctcactcatcacagtgggaacctcttcactgtcacccactaattcatcacagtgggaacctcttcactgtcacacactcacgaatcgcagtggaaacctgttcactgttacccgctcacccatcacagtgggaacttgttcactgtcacccattcccttatcaaaatgggaaccaatttactgtcacccactcagtcaacacagtgggaacctgttcactgttacccactccctcatcacagtcagaacctgttgactgtcacccacacttccattacattgggaacatgttcatggtcaacatgcactcatcacggtgggaaactgttcactttcacccactcattcattacaaggggaacctgattattgtcacccactttttcatcacagtgggaacccgttccctttcacccactcattcattacaggaggaacctgtttactgtcacacactcattcatcaaaatgggaacctgttcactttcaaccactcactcattataggcagaacctgtttactgtcacccactcgttcattgcagtgtgaacctgttcactgtcagcaactcattcattacagtgggaacctgtttactgtcacccactcattcaccactatgagaacctgttcactgtaacccactcatttaccgaagtaaaaacctgttcactttcacccacacattcatcactgtgagaacctgttcactgtcaaccacatatgaaccacagtgagaacctgttcactgccacccgctccatcaccacaatgagaactttttttaccgtcattcactcactaatcagagtggcagcctgttaattgtcacccactttttcatcacagtgggaacctgttcactgtcacccattcattcatcacagtggaaatctcttccctgtcacccattcattcatcacagtgggaacctgttcactgttacccattcattctcaacaatgggaactagttcactgtcacccactcattcatcacagtgggaacgtgttcactgtcagccactcattcatcacagtgggaacttttcactctcacccattcattcatcacagtgggaacctgttcactgtcacccactcattcattacaggactaacattttcagtgtcgctgactcattcatcacagtgggaacctcttcactgtcagccacttatttaccacagtgggatgctcttcactttcacccactcattcaccatactagaaaccagttcacagtcacctactaacagtggaattctgtttactgtcagttactcatttatcacagtgggtacttattcactgtccccaactcattcattacaggaggaacctgatcactgtcacccactcattcaccacagtagattcctgttcactgtcacccacttattcatcacagtgggaacctttccctgtcagccactcgttcaacaccgagggaaatatttcattgtctctgactcattcaccacagtagaaacctgttcagtcagccactctgttaccacataggaacctatttactgtcagccactcactcatcacagtgggaacctgttcactgtcacccatccattcatcacagtgggaacctgttcattgcctcccactcattgatcacaggaggaacctgttcactgtcacccactcattcatcacagtgggaaactgttgactgtctcccactcattcaccaaggtgggaatctgttcactgtcagacactcattcattgcactggaaacctgttcactgtcagccactcactcaccaaagtggaacctattcactgtcacccacttatttatcacagtgggaaagtgatcactgtcagccacattcaccacagtgggatattgttgactgtcagcccctcactcaccacagtaggaaacttttcactttcccccattcactcaccacagtgggaacctgttcactgtcacccactcactcatcacagtgggaacctgttcactgtaacctactcattcatcacagtggaaccctgttcactgtcacccactcattcatcacaggagaaacctgttcactgtcaccctctcattcatcacagtgggaagttgttcctctcagccactcattcaccacagtgggaaccaattcactgtcacccacttgttcactgcagcataaaattgctcactgtcagccactcagtcaccagaatgggaacctgttaactgtcactcactcattcatcacactggaaacctattcactgtcacccactcagtcatcacagtgggaacctcttcactgtcacccactcattcaacacagtggcaaccttttcaccgtcagcccctcattcatcacattggtaacctgttcactgtcagccactcattaatcacagtggtaacttgttcactgtcacccactcattcatcacagtgtgaaactgttcactgtctcccactctttcatcacagtgggaacctgttcactgtcacccactcactcaccacagtgggaacttgttcactgtcacccactccctcatcgcagtgggaacctgttcactgtcatcctctcatttatctcagtgagaaactgatcacagtcagccactcattcaccacagtgggaacctgttgactgtcaacctcttactctccacaatgggaacctgttcactgtctcccactcatttatcacagtgggaacctgttcactctcagccacttatacaccactttggaaacctgttcactgtcgcccactcatttaccacagcgggaacctgttcactgtcacccactcactcatcacggtgctaaactgttgactctcacccgctcatttacccagtgggaacctgttcactgtcaccccctcattcatcacagtgggactctgttcactgtcacccactcattaatcatagtgggaacctgtttactctcagccactcattcaccacagtaagaacgtgttcattgtcccccactcgttcaccacagtagaaaccttttccctttcacccaatcactaatcacagtggcaacctcttcactgtcacctactcatccattaccagaggaatatgatcactgtcaccccctcgttcaaaacagtagaatcttgttgacagtcacacactcattcaccacagtaggaacgtgttcactgtcagcactcattcatcacaatggaaaccttttccctgtcagccactcattcaccacagtgggaaccagttcactgtcacccactcaatcactgcagtagaaacctgtgcactgtcagtcactcagtcaccagagtgggaattttttcactgtcgcttaccctttcaccacagtgggaacctgttctctgtcagccactaatttatcacagtgggaacctgttcactgtcaccaacacattcatcactgtgagaacgtgttcactgtcacccacttattcattacagtagaaccctgttcagtctcacccactcactcatcacagtgcaaacctgtttactgtcagccactcattcattacaggagaaacctgatgactgtcatccacaggttcaccatcttagaatttttttcactgtcacccactcattcaccacagtgggaactttttcactttggccgctcatgcatcacagtgggaaccagttcactgtcacccactcgttcaccgctatagaaacctgttcactgtcagccaccctgtcaccacagtgggaacctgtttactgtcagcccctcactcatcacagtgggaaactgttcattttcacccactcatacaccacagtcagaacctgttcactcgcacccactcactcatcacagagggaaccttttcacaatcagccactcattcatcacagtgggaacctattcactgtcaggcattcattcaccacagtaggaacctgttcaattttagccactcattcaccacagtgggaacctgttcactgtcacccacacaatcatcatattgggaacctgttcattgcctcccactcatttattacaggattaacctgttcactgtcacacactcattcatcacagtggaatctgttcactgtctcccactcattaatcacagggggaacatgttcactgtctgacaccccttcaccacagtgggaacctgttcactgtcagccactcactcacctcagtggaacctgttcactctcacccactcattcaccacagtgggaacctgttcattctcacccactcattcaccacagtgggaacctgttcactgtcagtcactcactcatcacagtgggaacctgttcactctcacccactcactcaacacagtgggaacctgttcactctcacccactcattcaccacagtgggaacctgttcactgtcactcacacagacatcacagtgggaacctgttcactgtcacccactcattcattacagaaggaacctattcactgtaacccactccttcatcacagtgtgaacctgttcagccattgctcctggccagaaaagcttttaatcatctactgactgggaacaggaaaaccttttataatctagaacaaagagaatgagtctgcttgccacttacactgcatcaagattttgggatcttaaaccttgggttcataatctttaaactcacaaagggccctctaaactcttgcaatcatactggagatcttaattggagacttttaggtaaatctaagcagagaagcttctcctcaaaagcagatggcaaccttgacattgatagctttctccagaagatcaaaaacaaagacatctcttctatcatgacactcctagttcacttttttaatggctctacaaacaacagaaataaaaaagggatctcttgtgtgcacttttggggtatacttatatatgtaaataatttcacaactaaccttatatatcaacaaacttatgtctggataggtaaaagatgaagggccactataggtgagaaataagaaatgtctcgcattcttgctaaatgtgacatgggaaatttgttgtctcataatataagaaacagaatatttatccactgctcttggagcaatattgacttaaagagaaacttatgcagaataagttagagcacattgccaggaggccattactcttctgagtggtcattattcgttaggtctttctttcaaaggcttagagtaaatgaggctatggttggaaatttatcttccataataggctcaatagcagattctactgtaaaggctatggttacccaatagactttaaaattttttactaaagttgtgctaaataaaagaatttatctagtttacttactggataaacagagaagtatctgtgcagttgctagtatttgtagttgcacatggagaaatacatcgagtattacagagattcagttgtaggggattaatgaacacactgcttggttgaaatgaggagaccacttatctagctaatcatttgatctatttaatcatagttggttggttcaatggggacctcggttaaaaagcatacttcaggctgagcatggtggctcatgcctgtaatcctagcactttgggaggccaaggcaggtggatcacttgaggtcaggagtttgaaaccaatctggccaacatgttgaaaccccgtctctactaaaaatacaaaaattagccagctgtggtgacacaagtctataatcccagctacttgggaggctgaggcaggagaatcccttgaatcccagaggcagaggttgcagtgagccaagatcacatcattgcactccagcctgggtgacaagagcaagacttcgtctcaaaataaataaataaataaataaataaataaataaataaataaataaataaatccatacttcaaactcttgatattattttcctgatagtcaaaataatagtcaccctactgcactctattctctcaaaaattataaatctttgcatgcagtcatctctagaatgccaagtgatctctctttaactggaatgatgaaaacttgaagatgtatttgaccatgagaacaccataacctatgaatgatctgataagaacggaaacctaaaataatgaaaactgagagtgacattaaaactctgaggtttggttacactccgatctatgtgaaaacttaatcaaaaggggggaatctttttaaacaaaattattggaggccatcatcctggactgagcttgttcactgggcccaaacagaccaaaatgaaccaattagtcattcatgctaaatgtgacatagttaaactgaaaatttaaagaaataggtagattctaaaactgaccaggtcttgtttttcttttgcaaacagcagatatcaatacaaggaggtcccatccactgtaatccttttaaacaataataacctgaagtcccttttttcactttacaaaacccacagttctactattttacagtggaaattgagactaaatacatcttttttcttttcttttctttcctttttttgagacggagtctcactctgtcacccaggctggagtgcagtggcatgatctcggctcactgcaacctctgcctctcaggttcaagcaattctcctgcctcagcctcccgagtagctgggactatgggtgcccgccaccacgatgggctaattttcatatttttagtagagatggggtttcaccatattggccaggctggtcttgaactcctgacattgtgatccgcctgccttggactcccaaagtgctggggttacaggcatgagccaccatgcccgtccataagtaaatttttgatggtgacaaagtaatatcgatgtctaaagtttggggttatttctcaaaattgagaagctaaccaaatgagaaatattgttaaattaattatagcctaaagttaaccccttttatgtttaatttcggtcaataggtttttctgtacatagttaactaaaacctaactggatatctaaatagattgttacctattcatgtaccaaccactatgtttgtgccaataaaagaacatcaactgttcaagccatattcaaataaggcaaatcccaaactgtaattaatctggttatttctgtaccacttctattttctgtatgtcactttgcttttcctgtgcataaatcttttttaccatgtggctgtgctggattctctctgaggctactcaggtcccacagactacttaatttgcaaattattatttgcttaattaaactatgttaaatttaatttctctgaagttatttttcttttaaaagttttcaaatgttttctttcatatatatatacaagtatatatacatgtatatatatgtgtatatatatatatttttttgtgtgtgtgtgtgtgtgacagtgtctcactctgttgcccaggctggagtgcagtggcgcgatctcggctcactgcaatgtccgcctcccgagttcaagtgattctcatgcctcagcctcctgagtagctgggattacaggagcgagccaccatgcttggctaattttgtattttcagtagagacggggttttaccatgttggtcaggctggtctcgaactcccaacatcacgtgatctgcccgcctcagcctcccaaagtgctggaattacaggtgtgagccaccacgcccggcctcaaatttgttctatgataaaaaataagtgatgtgttgtagggctttgattatctaaaataagttatgttttccaaattactctatatcagctatgtcagctattttttccaaattattctatgttctttcaaaatgcttttgcaatttcttttttgttttttcattttgtttgaaatagagtctcactctatcaaccaggctggagtgtagtcgtgtaatcaatcatggcttaatccagcttccaccttccggtcttaaacaatcctcctgccctagacacctgagtatcatcatgcctggttaattttttaaatttcttttattgagccaggatcttattatgttgcccaggctgcacttgaactcctgagcttaaatgattctcccatctcagcctcccaagcctcccaaagtattggaattaaggatttaaggccaccatgtgcttcagtaatttctcgagattatttccaataataaatagtactttatgggcacaaatctacaagcaatctggtttttattttagaagtgtcactctccagggttttaagagtctagggcagctacttgagtagtgtgatccatggaggtacataggctttgaagtcagacagagttgatcctgagtcccggcccagccacttagaagctgtgagtgtttggacaatttcttgatgtggaagagttctacagactacatatgcagaaaaagcagaatggactgggcatggtggctcacgcctgtaaccccagcactttgggaagctgaattgggtgaatcacgacgtcaggagatcaagaccatcccggccaacatggagaaaccccatctctactaaaaatacaaaaattagctgggtgtgttggtgtgggcctgtaataccagctacatgggaggctgaggcacaagaatcacttgaacacaggaggcagaggttgcagtgagccaatatcacaccactgcactccagcctggtgacagaatgagactccatctcaaaaaaaaaaaaaaaaaaaaaaaagcagaaggatactgattgcaaatatggtagcaatttttcatccctcctgtatccatgtacattgacaggtgcttttacagccattcccatgaagagtcagaatctattttccaaacgcttgatctggctggccttatttgctcatggcagtagaaacctgagaacatgacaatgtgttggtttggagcctaggctcaaacagttttgactgcttctgcttttcttttctttccttttcttttctctgtttttttctttttttgagaaggagtctttctctgtcatccaggctggagtgcagtggcatgatcttggctcactgcaacctccacctcccagattcaggcaattctcctgactcagccttctgagtagctaggactacaggtatatgctaccacacccagctaatttttgtatttttagtagaggtgaggtctcgccatgttggccagactcgtttcaaacttctgacctaatgtgatccacctgtcttggcctactaaagttctggaattacaggcatgagccagcatgtccggcctgcttctgtttttctttcagaatgctgccatattcatgaaaaaaagcccatattaggccaggcacggtggctggtgcctgtaatcgcagcactttgggaggccaagatggacagatcaagaggtcaggagatcgagaacatcctggctaacacagtgaaaccccgtctctactcaaaatacaaaaaaattaaccgggtgtggtggtgggcacctgtagtcccagctactcagggggctgaggcatgagaatcacttgaacctaggaggtggagcttgcagtgagcagagatcgcaccactgcactccagcctgggcgacagaacgagactccgtctcaaaaaaagaaaagaaaaaagcccatattagccaactggagtataagatactatgaagaggagaagtaaggtatccctgttgacagtcccagaagcagaagctcacctctacaagcacagctgctgctttcctagtcaatgagcagctcatgatacatgtctgaaggagctcagctgagaacagaagaatggccccactgagcccagcctaaatggctgagcatttcaattatgagcaaatcagttttggatggttcattatgctgccatagttaactaatatgtgcacccagtgcagatagaatgccaagatttaataacaggttgattactagttaccttctaacattgggcaccataaaagtactgatatttttcccgatttaaagttagatgtcttgtaagataatgttgagaaatgcagaaatatggccaggggtggtggcttatgcctataatcccagcactttaggaggccaaggcggttggatcacctaaggtcaggagttcaagaccagcctgaccaacatggagaaatcccgtctctactaaaagtacaaaaaattagccgggcgtggtagtgcatgcctgtaatcccagctactcgggaggctgaggtaggagaattgcttgaacccaggaggcagaggttgcagtgagccaagaccacaccattgcgctttagcctgggcaacaagagtgaaactccatctcaaaaaaaagaaatgccgaaatacatgtggacatgtatgcatgtgattgtgcttatattcactcagtttcccacaccacagaagaaaacaggtaaccacagcctgaacattagagtcgaggtcaaatagcaaaataagtttgcctttaatctattttcttcctatgtaaacattaaaggtcaagactgtgaacagatctgaagacatagttttttttctcctgtggcccatcatcctttgctcactgtctgatctctgaaagaaagatgggcaacaggtggtaagcagtggtttacctgtgatttattcctgctgccatcagctttttctatagccactatttgtttcaccctcggaactgaaaagagacgttgataaatagaggctgtcccctcacctgtggcagaaaaggggtgttcaggccctccacccccactgacatcacagctgtacttcaatgtggcagctattggccatgtgtggctcctgggtgcctggaatgtggctggtctgaactgcgatgtgctagaaaggtaaaatacagaattagtttcaaagattttgtttcaaatgtatttatatttcattaataattacatattgctcacatattaaaatgaaaatattttgaatatattgggttaaataaattgctacaatcaattccacttgtttcttctttctttttaaagtttggctactagaaaatttaaaattcacctgtgactcacattttatttcagaggattgcctgttcaaaggaccagaatacaggaaggtcataaaatctaaaattttagaacaattgttgttatactttgttcatttgtgaatagccatataatatattatttttgaatgcatataaattgatacacaaggtaagggcaaatactctctggtgtgagcctggctcagctcaggaaggaagccctgtctgaaaaggctgcagcctaggctgtcactcgctcttctttcagcccagcatctgatcacatcttctgtcactcagggcctgaaaagaaggtgccttaaatatcatccaatcagagacgctgggctgggaaccgtccaatcaggaacgcagctggtgcggatagggcggcttccgggatgtggcggggcctttgtctctcgctgcagcctgagctctaggtcttgttttccctgctttgtgttttctgctcgtggacgcccagcctctgtggccctgtggcctgcaggtattgggagatccacagctaagacgccgggaccccctggaagcctagaaatggtgagagtgccaggtccgccatcccgagggggaaaggggttggttgaaaccggtgggaagcggctgtggcgggactcaggcctccctgtagtcagctccacaatctgcgctccagttctttttgcccagctcggccccagttcctccagccataagatggcggctgcgctgacagccggcccgggcgtcctgtctcttccctgcgcagtgactgtgccctggactggagccctctctgggcagctctgcattcgcagcaccgcgtctctcccagattgagcagggaccacgggagggttgtcaggggagaatcctgactcggggtgcgggttcatgaaagagctttgggctgtggggttcccagttcctctttttttctgttaaaaatgtatggggggacgggcgtggtggctcacgcctgtaatttcagcactttgggaagccgaggcgggcggatcatctgaggtcaggagttcaagaccatcctggccaacatggtgaaaccccgtctcaatttttaaaaatacaaaaattagccgggcgtcgtggcgcgcgcctgcaatcccagctactcaggagtttgaggcaggagaatcgcttgaacccgggaggcggaggttgcagtgagcctacatcgcgccactgcactccagcctgggcaataagagtgaaactccgtctcaaaaaaaaaaaaaaaagatgtataggagtcaccgcaaaaatattaaagaacttaaaaagtggttcaagtattgtagagcactcagctatggtttgtagtttgtggtccatgggaggagcttgaataaaagacttttataaggtgcatgataaaaaaatcaaattagtaattggttaggtacagttatatagtctcttaatttgtacgatcgtgttggcaattttctggttatgtgatcagaatttaattggcagtttatagttggttaagcctgaattttgttttccccgatgtggtaatttactaaaaaatgaaattttagttagatttttttaaaaaggaggaccccagggactagagccacctcagtctaattgcctgccactgaatcattttcacagtccacaggggacttcttttcccctgcatttttcacatatgtctcaagcagggtctcaagtctacttcttactccctgttcttccagattaactctgatttacagtaaaatactaaatttccagtgtcattgacattcccaaatgccaccttcccctctctgatacacattatcaattatttgtcctttattgtacattttatatttcaattaataattcttccacaaaacattggatggcactatttaaaaaattgtcttctgtttgtaaatatttcccatgagaagaaagtgaataataatccctgacaccatattgtaaaaaaatctctgtgtctcttttccttttatcttccctaggcacagagttcttatcagaatattggtgggtcaaggtttccgtttggagactttatggtgtgatgggtcatcagccactcttcagttttttcctggtcctgggttttcagtactgtatggggataaaccaggatgcccaccattgtggctatgttggctagagtgtctagtgaatatcagctcctgggtcattttctctcataggacaacctgaggtatgaagtgtatcctatcaagggagcaggtagatacccagggtctgagtgcagtctcctggtgtactcttcctttgaaaagctaactccttgagacattaaaattgacttcacccagctgggcgcggtggctcacacctgtaatcccagcactttgtgaggccgaggcgggcggatcgcgaggtcaggaatttgagaccagcatggccaatatggtgaaaccccatctctactaaaaatacaaaaattagccaggcctggtggcacacacctgtaatcccagctactagggaggctgaggcagaagaattacttgaacccgggaggtggaggttgcagtgagccaaggtcatgccactgcactctagcctgggtgaaagagcgagactgtatacaaaaaaaaaaaaaaaagattgacttcacccaacccagcttctatttcttggagacacattgagagaaaaatgcagaaataatttttaccccctggattctctaagatttgtgaaagaaaaaatagtatcccaaaagacaaaaaaaaggtcaccccagtgagatggtgcaagaacttgcaaagtaaaatgcacttggggcagtcactggggcatagtgtagtgtctcttgagaggttggtcattgagaactttagtgagcaggagcgggtgggagaatctttcaagtgattgaacggcctgacttgacacataggtcagacacatctcttttctaatcagcactgtccctctgtgggtttgtcaccttgaaaagatttgttcacttattttgacttcagcttcttttaattgtaaattgcatttgattagtaaagtttaaaaggcacaaaaatatttgcacagggtgtaaaagaagtgggttttagaaaaaaattaaaatctaatcatatattccatttgttaagaattctcatttacttgttcctttgtcagagtgagtttaaaaattttctcaggtgtgcttatggctgggtgattttaaacagaattccaaggcttagcttttagaatgttatcagggaaaaaattaggaaaaatctctcttccattttggctgtagaaaataaatagatttccacaagaaaatgtggtatataattggtgagttacatagattcatgaaaacacaaatttctctttttgcagggtaaagttgtgacagtgaatatttctgtcccatatcctgttatcttgatttttaagtttcatgataaattttatgagatgaaacttggtacctcctagaagtgttcccatgactaattgtttactacatgattttttatagaaataataaaataatacatttattgtctgaaaggaataaatgcttttgcttttctaattgaggtataaaatgtaagcaccaaaaattttctttttttatatgaacactgtgtttgagtgatttcattggagttttcagtttcaaaaaccaagggaataaatctgacatggaaattaaagcttgaacccagtgactccaacctaaggctaatattgagcctacaaaaaaaaaagattattaaaggcccagttagttctttctggggagcctcccctgcagatgtcccagcctgctcaccccagccatggaagaagtctttccatcctgagagaagctccaaagccttggaaagctggggccccacaggcagatgcagttaaggttaagatgaaaggaaactgggagggtctcactgatgataaagttttttattgttttgaggcactgtctagactttgtaaaataaaacaaagttagatttgtgtaaaaaaaaaaattgaattccaaaggaatattgcaacaggaggaagtaccaactatatcatctttatggcttgcaaagtttaggcagacaaaggctttgtttcctagggaggagcataaaagattagaaaaaaggtgggaggggagtggcaaatggagtgtgaaaaaaatcagattttagatcagataatgttttaccctgaagtcagcatgttcataggagggacataaaatggggttgtatgttgactcacactcagggtagctcaaagttcaggagcctgtgggaaaaaaataaacttaagtttgattaagaagtattttatttctgtgcgtggtggctcacacctgtaatcccagcactttgggaggctgagatgggcatttcacctgaggtcaggagtttgagaccagcctgaccaacacagagaaaccccatctctactaaaaatacaaaattagccaggcgtggtggtgcatgcctgtaatcccagctactcaggaggcggaggcaggagaatcccttgaatccaggaggtggaggttgttgtgagctgttatcacgccattgcactctagcctgggcaacaagatcaaaagtgtctcaaaaaaaaaaaagtattttatttagaccagtgaagacaaattcagctcatttttttaatgagaaaaggaagaaaatgtgtacagtatgtatctggctatgtgataggtaagaaaagggagtgtcttctaagtcataataagaagggtgtttttggctgggcatggtggctcacacctgtaatcccaacactgggaggctgaggcgtgaggatcacgaggtcaggagttcaagaccagcctggccaagatggtgaaaccctgtctctactaaaaatacaaaaattagctgggcgtggtggtgtgtgcctgtagtcccagctacttgggaggctgaggcagaagaatcgcttgaaccggcaggcggaggttgcagtgagccgagatcatgccactacactccaccctggcgacagagcaagactccatctgagggggaaaaaaagtgtttcttttcataaactgttgctggagcacacaaaggatgacttttattaatcacagctattttccaggattatgtatgtgtttcatttttccccacctctttttttgtcctatacatttctttcatttgacttcttctgggttgtatcttttataataaactacagagtttgctgggttctgtgagtagctctatcaaattattgaactagagggaggttatgggaatccccaaattttaaacagtagctcagaagcataggtgggcctatggggtttgtgactggcatctgtaatgagggcagtgttgtgggactgaaccctgaatcggggtctgtgctgactctgggtggtgtcagaattcaaatttcagataatgagtaggtgctggagaattgctttgtgttcagcaaactctatagatttgataccagaaaaaagatatcacagaggcctggcctcgaatggaactctgggtgtctgggaaggggaggctctgctctcctgtacacaggctgtcacactgcccattgtcttgtgattccaggtctcctcccagggtgactgtggactgaaaacttagaggaaaggacctctgatgacagacccccttttcttgcagctgccaccacaggagtcccacccactcacacacactagacattgacgtgtccacatccctctcaagactagtcatcatcctcaggaatttcaccacagcattgtggatcctagtatttcttgccaaaatcccacaagagtgtctacaagtctcctggcatatcccaacccccagacactgaatctgcagcagcaaactgttttctccaccaacctagggttctggaccacctgttcataatctcatctgcctgcacaggcacaaataaatcagagtacagccccaccgggaccgctgtctgtagcaaaaacctacagtccttccacctacattgcactttaccccacccatgaagtttttttcttttaacttttgattttggttcaggggtacacgtgcaggtttcttatataggtaaaattgtgtcacgggggtttggtgtagattattttctcacagaggtactaagcatagcaccaaaccaatatttattcaaattctccttgtcatctcaccctccacccttactaggcctcagtgtctgttgtttctttctttgtgtacgtgttcttatttagctcttactttttttttttttgagatagagtcttgctctgtcacccaggctggagtacagtgacaggattcactagacaaaaactgatctcttcttttttttttttttgtttgagacaccgtcttgctctgtcacccaggctggagtgcaatggcatgatctcagcttactgcaacctccgcctcccaggttcaagcaattcttctgcctcagcctcccaagtagctgagactacaggtgcacaccaccacacctggctaatttttgtatttttagtagagacagggcttcaccatcttggccaggttggtctcaaactcctgaccttgtgatcccacctcagcctccaaaagtgctgggattacaggcatgagccactgcacccagcctatttctatttctttaaccttgctaagaatacatatgtatcttataataaaattaccctagaaaaccttaaaatatttctttaaatttcttagtatatgttataaaattgagggggcagtggcttggcttaaaaagattaagattacacaaactctgggatttaagtttctcttaggtaagcttaggaaaaacagaactggaaataccctagtggcatagagaacagagttctacatagggtcctctccctgccccagttctgtttagatttaacctatttggaggccttatttaggtctggccccaccctggagtcttgcctcacacaatttgttagaagaaatcaaagttttgggccaggcgtggtggcttacgcctataatcccagcactttgggaggccaaagcaggcagatcataaggtcaggagttcgagaccagcctgaccaacatggtgaaaccccatccctacttaaaaaatacaaaaattaccctggtatgttggcatgcacccgtaatcccagttacttgggaggctgaggcaggagaatctcttgagcccaggaggcagaggttacagtgagctgagatcatgccattgcactccagcctgggtgacagagcaagactccgtcccaaaaaaaaaaaaaaaaaaaaaagaaatcagagtttttgtctggtgaatccttctgcctttctagagttcatgctcacaatttccttaaaccccaaaacagataaatggtaaaaataaagtatgtattttagggtcttaatttttaaattttgtattaaagtgagtgcttgcagaaacattctatttaacaacttgttttctatttttgcaaatccagtagttgctctgcaagtcacataaaattaaatacaaacacagtaaaaaacttctctaaaatacattaaactttcctttctgtattcctctcatctgtctatatttagcttttcttctatgcaattaaaaaaaatcaatgacagagaaacaagaagaaatggaaaggcagggctctttatttaaatcctaagaattattaaacacttaataacatctttcagggtgttatgatgatgaaatcacgtaatgtgttatggccaacacagtgctttttaacatccttttgagtacatagttcctgcttaatatatcttgcattagtacaggtgtacatgttgttgccaaatgcaggcttattcaaacattgctgccttctgtttcctctgtaaactttaatgagccagcaaagaatatgatacttaaggatggagatggattttatttatttatttagagacagagtttcgctcttgctgcccagactggagtgcaatggcacgatcttggcccaccacaacctctgcctcccaggttcaaatgattctcctgcctcagcctccctagtagctgggattacagacatgcaccaccacacccagctaatttttttgtatttttagtagagactgcgtttctccatgttggtcaggctggtctcaaactcccgacctctggtgatccacctgcctcggcctcccaaagtgctgaaattacatgcatgagccactgcgcctggcagagatgggttgtctttatttgtaccagaagtatttggttgtgacaagagtgctgagtgtaagggaacctgtgctgtgcctgctttctctaatgccaataatgagcccaagggaagcaacatcagcactgacagggttgttacctattcatggactcttttcaaacctgcagaatcatattacatagaatggagccaaaattaccaagtgatttataagctcattaaaacttgagaggcaatgcttagctaagtggttatcagcccaggcttctcattaggattccatggccaatttgcagaaatctctttacttgtgccctttccacagattctgtttattgttctagggggaagcagtcatgttgtagtaatgaagtgcctcatgtgactcttaagttgaggccagaatcaagtatgaggtgttccagatacattcatgagttaagttccacctttgcactaaagggtggccgcaggactgtttctgtttggatttggtagggacagagcaatgtggccatattttctttttctttttctttttctttttttttttttttttttgaggtgcagtttcactggagtgcagtggtgcaatctcggcttactgcaacctctgcctgctgggttcaagcgattctcttgcttcagcctcccgagtagttgggactacaggcacatgccaccacgcctggctaattttttctatttttagtagagatgctgtttcatcgtgttagccaggatggtctcaatcttctgacctcaggatctgcctgcctcggcctcccaaagtactgggattataggcgtgagccaccaagcccggccatggcccatattttcattattgtagcagaaattgctggtgtctgtgacaggggagggcacctgagaacaggaaaagtgaaacatattttgatacccatggagcagctcattgttcctgaatctcttccattataaaggacataaatgagtgagctttttctgcaggtcttgatccttctgcctgtgggtctggtggtagcagatgagcagttgatgttgacatctttaaagacatattctcaacatgcagctgtaatttgttcaaagaatctcatctggaaaggattcccagaaaaggaggaaaaagaggaaaaaaatggcttctttttttaaagcaaaacatgtctcagatcaagagctgtgtccactttgcctcctagaatgccatgcaaatcattacttctctattgtattacccctccctaaagagtttaactacttgtaaaaattcttatgatagtcaagggtgtctgaaaagtattttttttctatataccagagccctttctacattctttacattgtggctttttatatgccatgcagaattcctaccacaaatttataatctgcactattaaaaatgttccctttgtggctcttgaacatgaaaaggtgtggatactcaagatttctattgggggaaagctggagtcatttgtaaagatggaaaacatgtaatgttgaggttccatctgtattctccattacctctgtgcaaaacaggatcaaggaaatgcttagttaaacaagatgacatttattacccagaaagttctaaaaaaaaaattatcaggagatacctgctctctagggtgctaaagaaagatgatttaaaattactattacaaattatagacagggaagatatctgtatcctgaactttgcataaaactgattttttaatgttaaaattcagactatagtttggaggagcagtatcacagccgtgatgctgtgtcatttcatgtgcatcaacacatcataaaaatatgtcctaggatgggcgcggtggctcagcctgtaatcccagcactttgggaggctaaggcaggcagatcacaaggtcaggagatctagaccatcctgggaatggtgaaaccccgtctctactaaaaatacaaaaaaaaaaaaaattagccgggcatggtggtgggcacctgtggccccagctacttgggaggctgaggcgggagaatgccgtgaacccaggaggcggagcttgcagtgagctgagattgcaccactgcactccagcctgggcagcagagcgagactccgtctcaaaaaaaaaaaaaaaaaaaatttgtcctagtgcagttcatgttaatgattcacttggttaaagagctctctgacagattttgtcactatagagataattattttttcttcattattatcttaatgcagctaatgtgcataaaccatcacagttaatccagcagctgcccttttttcttagttttttttttttgcatacatctgtctttggaaagtcaaagctcttatctttgtttacaggccagaaaaattaggaaaaacacaggttcttccccttactggatgtttgacaaaatattcttcttggccaaaaacattaaccttactggtgagcttgttagaaattcagacaatcagactttattccagatcatctgaaaaaataatctgcattaacaagttctccagtttattgtacacattaaaatttaaaaagtaccttctaactcaacctgtcttttccatctgaaaaatatacacaactcattctgtagaatgtgtatatggcatccaaaaatacacatttttatgcccttaattttatactatatcatccagaaaagtatcatgtatacactggtattgtggatcttatgccactctcttttcttagagttaaaaaatatattagagaatatttctgtgttaaaaaaattattttattttataattttagtcactcctgtaagtcagaaacagttacctgtactctctcatttcaccttgagtaaaattaaaaatgcttttcataaccagttggtaattatgtgtgtgtgtgtgtgtgtgtgtgtgtgtgtgtgtgtgtgtatgtgtatgtgtgtgtatctttcagggaccattgacatttagggatgtggccatagaattctctctgaaggagtggcaatgcctggacactgcacagcggaatttatatagaaatgtgatgttagagaactacagaaacctggtcttcctgggtgaggataacttcaatacacaatttctaatatgccctaaaggttttatttcttttatttgtggaatgtttttctggtaaagtgtgctttgcataaattagtttcagatccctgttttcaagaaaatcttggggattaatacatgtagaaaagaatttctgcaagatgtttcattttgaccttaactttccaaatttctgagctgatctgtatccttcactgtagattactaaattccacaaatttaatggcataaaatttttgcccacaccttaaaatgtaattgccaacaccaatttttgattcaatagtactggatagtaaaattaagaaactgggccaggcttggtggctcacgcctgtaatcccagcacttcgggaggctgaggcggacggatcacgaggtcaggagatcgagaccatcctggctaacacggtgaaaccccgtctctactaaaaatacaaaaaattagctgggtgtggtggcaggcacctgtagtcctgtagtcccagctactaaggaggctgaggtaggagaatggcatgaactcaggaggcggagcttgcagtgagctgagatcacgccattgcactccagcctgggtgacagaatgagagtgagactccatctcaaaaaaaaaaaaaaaaagaacctacaaatcaaaaatattttttaaatatttgaaaatgtctgttataaattagtattttgggattaatttactagctaagcacattactagattggtcattagagaatatgagcaagatttatattatttatttttaataaaacaggtattactgtttctaagccagacctgatcacttgtctggagcaagggaaagaggcctggagtatgaagagacatgagatcatggtggccaaacccacaggtaggtgaaagtgaaaatgaatacagcagatgacacatgagaggtccaaaggccaaagagaaagccagtccttaaaatgtgatttaggaagctgtgttccaaagaaaatagtttctcagaagcctgaggtttctttctttcttttttgctctcacatgggggcatcttctgtcttatacttttaaattttctaaggattctacttttccttcggtgatcttcaagtttgcagttagagccaaagtcctcttcgtggcatataagagactgcgcagtctggctgctttttcattgttttgggggacacacaaatatctgcataattttgaaaaagtctatgttaagcaatatttttaattgtatttttgcatcatgtttgaaatatgtgagtagtggtttctgttccattgggggtttttttgtttgtttttctgcacattccatcctgtttgtattactacattcttgaaatatagtttgaaattataaagtatgatgcccctatgctttgttcttttacctcaagattgctttggctattcaaagtttattatagtttcatgtatgttttagaattgtatttttcattactgtaaaagatgccactagaattttttttttttttatttcgctcttgttacccaggctggagtgcaatggtgtgatctcggctcaccgcaacctctgcctcagggtttctcaatgttggtcaggctgttctcaaactcccaacctcaggtgatccatgtgccttggcctcccaaagtgctaggattacaggcgtgagccaccatgcctggccaccactagaattttgatagggagtttgttgaatctataggttactttgtataatatgacactttaacaatatttatcctttcaatgcatagacataaaatattttaaaatttatttgtgtcttctctagtttctttctatgatatcttatatcttccagtataaaaatgttttacctcttttgttaaatttgttctcagaaatttattattttgatgctattataaataagattgttttctttatcagatagtttgttttatgtatatggaaccctaatttatacttgtatgttaattttatactttgctaatttactgggtgtatttattagtttagacaggttttaatgtactattcatggttttctatatataagattatatgatctacaaccagcaacttttacttatttgtcttcaatttcaatggctttaaaacaatttttttactaattcttctgccacatacttccagtgctatattaaaatagaaacattgacaatggtattgggaatgggtgcttggtgtcacaaaaatcctttgagagacaaaggatctctcagcaaggctagtttactttctgcagaaagagtacactcgccagcagttttgccaagagaatacactaaacaaaggaggcagggtcatttataacctgatgggtccaccctactgctgtgtccggtttccattggctacaacaggacctcacattctgtatttgtcccagttggctagcaacttagaactttctaaaagaggcaaaggcagaggagaacaaaggaaggagggagcaacttgtggatgctgagaaaggtaaaaacacctccagataaggaataggaacaggctatgacctaatgcttgcttggaccagtataagcatgccagggcaaatatttaggctaaaatgtgggagctaagaacacaaagtacattgatttctttatcacggctagcagatatctaagaatgtcagcacaggtgtttgaatacattttgcttctaagagaagttactatttattcctaattacacgaggaggaaagtccctttgaaaaggaacctctatttcacattttacgatgagcacaatatagttttgcattggtgtatatgaatttgaatgagcaaacagctcttcaagtttttggggtttttttgtttgttttgttttttgggtttttgttttttgtttttgagacggagtctcactctgtcatcaggctggagtgcagtggcacgatctcggctcactgcaacctccgcctcctgcgttcaagtattcccctgcctcagcctcccaagtagctgtgactaaagccgtgcaccacaacgtctggccaattttttgtattttagtagagacgaagtttcaccatattggccaggcgagtctcaaactcctgacctcgtgatccacccacctcagcctcccaaagtgcttggattatagacatgagcctcagcgcccagccctcttcaagtttttataaaccagtttcagaaggtaaagatcttctgttgggcccccagggtgacgggatgccctctgagtttatagtgcagaggaattgtagcttgatcagaaggctgctgggtctgcactagggtccgcctttagttggtttgttataagaggcttgggtagctgtaactcccattttatttttggacaaactgaatatccttcaggacttctatatataaggcagacactagggcaggtttctgcagtcgagtctgctaatggcagggcttatatcaggatgtggatgagtatggctttcactgaataccagagagcatttctctgggacactgtgtgggtttctgtgtaggcagaactggccataaactgtggcttagggagctggaactgagtcattaaactgctttggggaccacagtaaaggccaaggtctgcaggcctgtctgcatgtctataaattgatgtcttcctccaggactctggaagggcagggcctctttcatactgtggctgggaggagtttgggatgaccaagctgggtgggccatttctttggtctatagtcaagaacagagtttctgtagattgccacctgaatgagggcctgccttccgaaacggatactcctcaatcttgggctttagcagtttcacaagtccctccctggatctcaaagctcttagaggcacttattttggagatggggtcttgcttcagaacccagactagtcttgtttttttgtttttgagacggagtctcactctgtcacacaggctttagtgcagtggcatgatcttggctcactcccatctcctcctgggtttaagtgattatcgtgcctcagcctcctaagtagctaaaattacaggcacacaccaccacacagggctaatttttgtatttttaatagagacatggttttaccatgttggataagctgatcttgaacttctgacgttaaccttcccacctcaaccttccaaagtgctggaattacaggcatgagccactgcatttgtcctaggatgctcttgaaatcctggcctgaagcaattctccaacctcagtgtaccatgtagctgtcattataggggtgagccatgatgcctggctctctcataagggcatttttgtcaggattggctgaaaaaattttcttgctgttggggcataagaaagtagggcaccttttatttttccatcttgctgatgttactctctatatacatttttctttctattttccatttcaaacttttctgtaattttagattcagacatttagaacaatatgctagaatttacatgttatgcctgaagtaaattatacaattagtaggcactccatatttactaaaatagttacttataaatttaagtttgctgcaggcaaaacggaattataggatattcacccactttcttcagcctaaatctaaataatagcataatttattcccaaatatttgttttatatatcagaggctctaaccatattctgctatatgtgtgtgtgtgtgtgtgtgtgtgtgtatatatatgtgtgtgtgtgtgtgtgtattttatttagcagtttaaggctatttgcttctaaatttggattgcagcactttcattttgtgtaaaaatgcatatatttaaaacaaaatttatctcgtttcttttaaatgattataaaaagtttctcattacaatattctatttatgcttatactgtattttctctgaaattttactgccatacagtgcctgccaatgattcaaagtacctgctttccatgagtacactgtcaaatattgttgtctagacacattctttcttaatggtacatcaatattgcaaaccagagtttaggagtaaacatttattactgtcttgcagttccatattagtgtgttttagtgtaggcttgttttttgttttgttttttgagacagtcttgctctgtcacccaggctggagtgcagtggcatgatctcagctcactgcaacctctgcctcctggttcaagtgattcttctgcctcagcctcccaagtagctgggactacaggcacacaccagcacggctggctaatttttgtatatttagtagagatggggtttcaccatattggccaggctggtctcggactcctgacctagtgacccgcccacctcagcctcccaaagtgctgagattacaggcctgagccaccactcccaggtagtgtaggtttcttaacatcagtttattgtgttttttgcttttacttatgcattataattttaaataacttgcaattctgtatgtacacgttaagtcaatgtgaggtttaattaagatacaaatcagccatatgtctataacaatctgattatatatgtgtgtgtgcttatctataaatatgacccccagtctggagtgcaatggcacaatctcagctcaccgcaacctctgccttctgggttcaagcgattctcttgcctcagcctcccaagttgctgggattacaggcatgcaccaccacacccaggtaattttgtatttttagtagagacggggtttctccatgttggtaaggcttgtctcgaactcccgacctcaggtgatccgcccacctcagcctcccaaagtgctgggattacagatgtgagccactgtgcctgacctcttagctgattttcagtggttgtttcatcttgtttaagtgagtagttatggagatactcttatttttaccatgcgtttaataatgaatatctatttcctttatgtgaaaaaaaaaaaaacactttgtgatatgaaggtaattcctgaaaggatttataattctatattgttttcagtttttttctttagaaaattgtttttaaaacacataaagtttgtcatcttaaatctattgaagtgtacattttagggccaggcatggttgtggctcacatctgtaatcccagagatttggagaggccaagacaaagaggatcacttgaacccaaaagtttgagaccaccctgggcaacatatggagactccttctctacaaaaaatttctttaaaatggcctggcattttggtgtgcacttgtggtccaagatctttggaagattgaagaaagaggattacttgagcctgggaatttcagactatagtcaaccataattgtgccactgcactctagtttaggtgacgaagtgagaccctgtctccaaaaaaaaaatagctttatatttcaggaatgttaagtatattcacattgttatgcaaaagacttctagaaattttacgtcttgtaaaaccaaactcaatacccattaagtaacagcaacccattttaccctctctggtgctcttgacaaacacccttccactttctgtttttatgagtgtgaccacttaagatatctcatataactggaataatatagtatctataattttattactagcttattttaaagggacataatattctcaaaggttatcttaaattgttacaagataatctgttttaagtctgaaaaaatatttcattatatgtatatgttacattttttgatgtgtttataaatcaagggacatctgggttgcttcagttttttggcttatgtgaatactggtacaataaacatggatgctcaaatatgtctcccaggttctgtgttgcatagttcggatatacattcataaatgtgattgctgtacttaatgataattccagttttaattatctgaggaacatttataacattttaaaataatgactgcatccttgttttccaccagttagtatgagttttattttcattgcatcagcaacaaatttggtgggtttttttatattttatagtggccattctgatgggtgtgaagtgattttgtttttcattgttatttttatgcatttctctacaaattagtaattttgtgtttcctttcttccctccccccactcttcctgccccaggtggagtcttgctccaggctggtgtgcagtagcatgaactgagctcactgcagcctctgcctctggggttcaagcaattctcctcagcctcctgagtagctgggattacaggcacatgccgtcacacccggctaatttttatatttttagtagagacggggtttcaccgtgttggttatgctggtcttgaactcctgacctcaagtgatccacccgtctcagcctctcaaagtgctgggattacaggcatgagccaccgtgcctggccacatttcctttcaaatgctttttcccatttgtgtattctttttgagaaaaatttagttcaattatttgttcatttctaaataaaattattcaactttattgttaagttttacaagttgtttatacattctcaatgttaacttctatgatatgtgatttgcaaatatttttagctatttcctaggaggcattgtcactctattgaatgttttctttgatgcgcagaaactttgaagtgtaatgcagttaaattttactgtcttttctttgttgctcatgcgtttaatgtcgtatctaggaaaatagtgccaagacaaatgtcatgtctttcccccttcatttttatatctgggcattttatttaaaaatatttttcatatgtggttcaaggatataatccatcttcatcttatccatgttgatatccagttttcaacattatgtcttgaagaggttatctttttttctattgtgtgctcatggcaactttacaagatcatttgatcatatacagatttctgtgctctctactctgttctttgtttatctgtttttgtgtcagtaccacattgcttttgttattgtagcttttatattattattattaattttttttttttcctgagacagagtctctcactgtttcccaggctggagtgcaatggcataatctcggctcactgcaacctctgcctttcaggttcaggagtagctgggattacaggcacccacctccacacctggctaattttttgtattcttggtagagacggggtttcagtatgttggccagactggtcttgaactcctgacctcatgatccacctgccttggcctcccaaagtgctgggattacagacgtgagccaccttgctggcctattatgtttttaaatcaggaagtataatgcctctgttctttttcatgggtgtttggctatagtttataatcaaattttaaacaatatttctgtaaaaatatgtggtattgggatttctagttagattatattgaatttgtttgccactgtagtttgtattgacatctttgaaaaattaatttttttgaaacttgggcaagaatatgttgaagggtgtgttttatttttacgtaattttggattttccagttttgcttttaattcctagttgcattcagttttggtcagaaaacacacagtgtataatttttgtctgcttaaatttatttgttgttgttgtcattgttattttgacgcagaatcttactctgtcacccagtctggaatgcagtagcaagattttggcccactgcagcctcaaccttctggggtcaagtgattgttccacctcagcctcccgagtagcttggactacagacatgcagtactatgcctggctaattttttgattatttgtagagacagagtctcactttgttgcccagtctagtctcaaacttctggctccaaatgatcctcctaccttggtctcccaaagtgttgggattataggtatgagcctgttcacccagccagtattcttaaatttaataagatttgttatgtgtcctaacagaatacacaaggtgcaaataagaatgttgtgtattctcttgcttttgactgaaaagttttgtacatgtctgttaatcctagttggtctgtgatgtggtttagatgttcgtgttcttcaaatcttatgctgcaatgtaatcctcactgttggatgtggaacctggtgggagatgtttagatcatggggcaaatttctcatgaatggctttgtactatcctcttggtaatcaaaaagtttacactctgttaattcagatgagagctgcctcattaaaagaacctggccccttcacctcacatttggttctgtcttttactatgtgatatgtccagttactgttggccttccaccattgtggaagcttactgaaaccttccaccagaggcagatgccggcacacacttcttgtacagtctgcccaacgatgaaccaaacaagcctttttatttataaattatccactctcaggtattcctctatgtgcaaaataatatattctgtaacgttgtctaagttttctgttttcttattgatcttttgtctgaattttctatttattattaaaaatggggtcttgatgtctacaattattatgttgctatgtatttcttgtttcacttttgtcaatatttgctttacgtattttggagccctaatgttgtatatacatatacacataaataaataggcataatagttttagattcctggtaaattgatccattttactattgtataatatcagtctttgtctcatgctagtacttgacttaaagcatataatgtctaatataattatgagtgtcttactcaattgtggttatatttgcatgtaataaaaagtttttccattctgttactttcagcttatttgactctatattttccagtttgttattggtattaaatattattttatgttgtgtatctattaacagatttatattttgtttttcatattctatagaggaaatttaagagttttatgcaccattattttgataataaataattttatgtgttgatatatttaatagttttttatttatatatgtttttatgatgctgttcagcatcattttattttttaacataatggactcatttagcctttcttttttattttgtatgcagtgtctcactatgttgctcaggctgatcttcaactcctagtctcaagtaagctgactgccttggcctcttaaaactgtaggatttacaggcatgagccactgcctggcaaccatgtagcagtttttgtaggactgtggtaggggtgatgaataccctcaccttttattttgaaaagtctttatttttatcttgtttttgaagtaaagtaattataattagtagtataattattatatatttttatatacttatatattatattaatatataattataaacatattttcaagtagtattggttaagaattttttattacatcataatttggaaagttctcagcttttttaaatcttcaagtaacctctgtattacttttttgctatattattctatgattttttttcatgaatatattgttctacttgatggtgtccaataagttttacatttcatgttttaattttgttttgcacttttatatttttgcgttttatatttaagggtattccagctcacattagttaattgtgtttggatgttttagtttatattataattgtgtatgaaaatatttaactctgcaatttatgacagtgtgaagcaaaatcaaatatgaatcagccatatgtctattgctaatgtgtttatgtttgcttgcctgtataaatattatttctattttcctataacttgtgtatttattgtgtagtttggttgtgaatggttgtttaatcctgtgtaggtgagtagtcataaaaattcttctacttttatcatcttatttgtgaatctatattatttctgtgtgggagaaacacttttgaattttaagataatataaaaactatcattactctgtatcttaggtatttctgtttatttttacttatcaaaaacataaaatttataataaaatatttgtaaatattcaatttagtgatcttaattatattgacattgttttgcaacatatcaccaaaatgtttttatcttgcaaagctgaatctgaatacacattaaacaactaccaattttttccattttgtagcactttccaaacaccactctgttttccttgtctaaggttgtaactgctttaaatatcctatacaatctctgtctttctgtggctggctcattttatttggcataatgtcatcaaaacttatatttacagttgtcagaatatttcctgctttttgaaaactgagggatattccagtattttgttttctgtttttttgaggtgaagtttcacgctgtcgcccaggctggagtacagagtgcaatggcgcgatctcggctcactgcagcctccgcctcctgggttcaagcaattctcctgcctcagcctctcaagtagctgagattacaggcatgcgccaccatgcccggctcatttttgtatttttagtggaggtggggtttcaccatgttggacacgctggtctcgaactcctgacctcatgtgatccacccgccttggccttccaaagtgctgggattacaggtttgagccaccgcacccagcctattccagtaattttatatttcaaattaaatctgctggatggtttaatgacagaaatttgcattgctttcacccattggctttcagtaacaatgctgcaataattatgggtaagtaaatgactctttatatgacatgtacattacgtatgtactgcattctcttattagtctatgttttcagctttatacttataccaagttgttttaattttgtagctttgtactgtgtttgaaatcaggaagtgtaatgcctcaaacgttttttttttttgaagattgttgggtactttattgtcttttgagattccatatacttctgaggttgctgtttctatttcttcaaaaatgcaatgagaagttttaaaaacattgccttaaatgtgtagattacattgagcagtatgaacatctttacagcattaattataccctgattccatttttatcttaaagagtaatttataaaattttagttctaaaaaatttgttaagacttctttttttgtcctaacaggttgtctatcaaaaagaatgtcgtatgagctattgagaaaggtgtatatcctgatgttactgaggagtgttctctatgcctctgttagaagtaattgttttatattgccttaaagttacctgttgccttctaatattctttttttttattattatagaaagtaggtattgaaatatcctactataaaaattatattgcactctatgtgtttcatcgattctgtcaatatttgttttatatatttggaaccttaatgtgagatatacacatgcacacacacacacacacacacaccccacaaatgtatatagaaatttttcagaggttctcagtgagtgaatctattattgtttaatgtccttctttgtctctttggagttttgactttaaagtacattttataaaatatgacagttttaacttaagatgtgttgtgtaatattacttagacctcttctgctctcatttggttaaaatttgcatggaatgtctacttccatcttgccactttcagtctttctttatcattagatcgcaactgactcttgtagaaaggcaagttgaatcctggtttttaatttttttaataaatccctttattgaaagtatgtcttttaattaaaaagttaactttatgtatatttaattttctgaaacagacttacaaatgttattttattgttttagttgattcttgtttctttgttcccaattttctctctctctttctttgtgtcatttttatttttgtactaatatgctttcactttttaaaattttcttttatatctctatacagatttttttgtggtaccttggggtttacataaaatctctaaaagatgcaacagtatatttaattatggtaaaaaatgaactttagttgtatacaaaaaatctttctcattatatctgccctcaactttcttattgatgttgctaattatatctttatgttgtaagtacattaatgagtgtttataataattagtgtttttatttttcaacttttagagaataactaaaaatgttttctgcaccattatgataatgctaaggaattctaattttggatatgtgcatatctttcccagaaagttatgcatttttatgtaataatatgttgttttcttacattatgttatttttagcatctttgatatgtagggcatatgcagtgccaatacactttttttttttttttttttttttttttttactaatttcaggactattacaatatcacatagttcccttctcgcttgcaaaattttcatgacaaatttactagtaatctcataagactatgcttataaatgacacatcacttttatcttgcatctttgaggattttctactttgtgacttgaaattgcactcatgcatgtgtttgttataaatatctttgtgtgtattctagtttgttgagcttcttcatttttacatcattttttcttatattaaaatttttttgtatttttcacctccacaatttctgttttttgatatttttaatatttttgttgttatcctcattcttctaattttcaattgttgtctgtgtttctattttcctcactgaatattattcaagtttttcaaactaatttgtatatctttatttttaatgatagctttctgaaatttttatgtttctgatggggctatgttgccccaatatttttatatgttgtaatctttcattgaaatttagacattaaaaacaaaccacctgtaacaatctttataatatagctttgtcttggcatatctgaaaccaattgtcttggatagagattctgagagtttctctaacatgttcttaggatgtgtcttgtctgaaatgttttaggtcttttttagttaaaggagtttgttcatgtttcttcttaatagtcagtaatcatttgctacaactatttcctgcctataatattgcagtctctttgctgctgtagcatttacctttgatctcagcagactcaaactgccattccaatgtataccatttatttcaagacagaaaccagtgtctggaaaagtccctagaaaccagaaataaaaatgttttttgccgctatttttcttgtcttttataaaagaaaccaagagttgccaatttacttctaaagccactgtgttacattgggcaaccgaaatagctgtgttgtaaatgtaacaaactttttttttcctatgtggctctttgcattatgctcacctggggcactgcacacacttaactcatttataaattttccacaaatgtattttggtcagtatgtttttgttacatttaaatgtctatgaaggatttagggcctatggtattttgctgtgccatcttacttaatgtagtttgtttaattttatatattacatttgtaaactatcttcatctaagtctagcaagtggagtaatttgtcatttttgtttctttcagttatgtgttctcattttgcccaagacctttggccggagcagaatataaaagattctttccaaaaagtgacactgaaaagatatggaaaatgtagacatgaaaatttaccattaagaaaaggctgtgaaagtatggatgagtgtaagatgcacaaaggaggttgtaatggacttaaccaatgtctcacagctacccagagcaaaatatttcaatgtgataaatatgtaaaagtcgctcataaattttcaaattcaaacagacatgagataagacatactaaaaagaaacctttcaaatgtacaaaatgtggcaaatcatttggcatgatttcatgcctaactgaacatagcagaattcatactagagtaaatttctacaaatgtgaagaatgtggaaaagcctttaactggtcctcaacccttactaaacataagagaattcatacgggagagaaaccttacaaatgtgaagaatgtggtaaagcctttaaccagtcctcaaaccttattaaacataagaaaattcatactggagagaaaccctacaaatgtgaagaatgtggcaaaacttttaaccgattctcaactcttactacccataagataattcatactggagagaaaccctacaaatgtaaagaatgtggtaaagcttttaaccgatcttcaacccttactacccatagaaaaattcatactggagagaaaccttacaaatgtgaagaatgtggcaaagcctttaagcagtcctcaaaccttactacacataagataattcatactggagagaaaccctacaaatgtaaaaaatgtggaaaagcctttaaccagtctgcacaccttaccacacatgaggtaattcatactggagagaaaccctacaaatgtgaaaaatgtggaaaagcctttaatcatttctcacaccttactacacataagataattcatactggagagaaaccttacaaatgtaaagaatgtggtaaagcttttaaacactcttcaacccttactaaacataagataattcatactggagagaagccttacaaatgtaaagaatgtgaaaaagcttttaaccaatcctcaaaacttactgaacataagaaaattcatactggagagaaaccctatgaatgtgaaaaatgtggcaaagcttttaaccagtcctcaaatcttactagacataagaaaagtcatacagaagagaaaccttacaaatgtgaagaatgtggcaaaggttttaaatggccctcaacccttactatccataagataattcatactggagagaaaccatacaaatgtgaagaatgtggcaaagcttttaaccaatcctcaaaacttaccaaacataagaaaattcatactggagagaaaccctacacatgtgaagaatgtggcaaagcctttaaccagtcctcaaaccttactaaacataagagaattcatactggagaaaaaccttacaaatgtgaagaatgtgacaaagcttttaaatggtcctcagtccttactaaacataagataattcataccggagaaaaattacaaatatgaaaattatggcaaagctttaatcaatttacaagtcttactaaacataagaaaatttatactggagagaaactactaacctgaaagatgtgacaataattttgacaacacctcagacttataaaagtaatcatactggtgagaaattctaaaaatgtgaagactatggcaaagtctttaaatggttgtcacactttaggtaagataattcatattggaacaaactacaagtgcaaacaatgtggcaaaacttaatttatgctcacaccttactgcacagaaaagaatttttagttgagaaaaagtatacaaatataaagaatgtggaaaagccgttaatatctgctcacatcttactcagcatcagaaagtacttaataaaagcattataaatggaattactgtcaaaagcattcagaaaatataagcctttaatgtgaaaaagagtaaccattttgaagacaaacattgcaaatttaaagagggttgtagtacctttaattgtatcacaaatcttattgtacagattttgtactagaggaaacccctgaagcagttgcttaaattttgtttaaaatcagatttttttttttttctttttgagacggagtttcgctcttgttaccgaggctggagtgcaatggcgcattctcggctcgccacaacctctgcctcccgggttcaaccgattttcttgcttcagcctcctgagtaactgggattacaggcatgtgccaccacgcctggataattttgtatttttggaagagacagggtttctccatgttgttcaggctggtctcaaactcctgacctcaggtgatccacctgcctcagcctgccaaagtgctgggattagaggcatgagccaccacacctggccaacatcagaggatttatatttgagaaaaaccctgcaaatgtaacaaattttgaaaaactttttcaaaaactacagcttaaaaagcagcagaggattcatactaaaatatatttttgcagatgcagtagatataaaaatatatttaatccaaagttaagtttatgtaaatatcagaggattcacagtagaaatatctaaggtgctggcacttcagacaccacactaaatcagagtgctgagtatagaaaataatccaaaactaaatttggtggattaattatttgtatataactttaaaagaagtagaactttttttgcagagttttaattacattcaaagtatacttttttccttaaaaaagttaggtttttttgaaaagaaaataatcatgtcattcaactttcaaattacttcatgctctttcttcttcattgctattatattcacatgtgaaagcatgtgatcagtggttgctacatcaaagataggagatttttttttcttaggtcattatttatgaccttttctattaaagaataagaacattaggctgggcgcagggctcatacgtataatcccagcactttgggaagctgagacaggcagatcatgaggtcaggagtttgagaccagcctggccaatatggtgaaaccccatctattaaaaactacaaaaattagctgtccactgtggcacgcacctgtaaccccagctactcgggaagctgaggcaggagaatcacttgaacccaaaaggcagaggttgcagtgagccgaggtcgcaccactccacactagcctgggcaacagagcaggactctatctcaaaaaaaaaaaagtatactattctttttttttctttatttattttattttttatttttttattgatcattcttgggtgtttctcgcagagggggatttggcagggtcataggacaatagtggagggaaggtcagcagataaacaagtgaacaaaggtctctggttttcctaggcagaggaccctgcggccttccgcagtgtttgtgtccctgggtacttgagattagggagtggtgatgactcttaacgagcatgctgccttcaagcatctgtttaacaaagcacatcttgcaccgcccttaatccatttaaccctgagtggacacagcacatgtttcagagagcacagggttgggggtaaggtcatagatcaacagcatcccaaggcagaagaatttttcttagtacagaacaaaatgaagtctcccatgtctacttctttctacatagacacagcaacaatctgatttctctatcttttccccacctttcccccttttctattcgacaaaaccgccatcgtcatcatggcccgttctcaatgagctgttgcgtacacctcccagacagggtggcggccgggcagaggggctcctcacttcccagaaggggcggctgggcagaggcgcccccccacccaacttcctggacggggcggcggccaggcggaggcgggccccccacctccctcccggacggggcggctgccgggcggagacactcctcacttcccagacggggtggctgccgggcggaggggctcctcacttctcagacggggcggccgggcagagacgctcctcacctcccagacggggccgcggccgggcagaggcactccctgcatctccgacgatgggcggccgggcagagacgctcctcacttcctagacgggatggcggctgggaagaggcgctcctcacttcccagactgggcagctgagcagaggggctccttacatcccagacgatgggcggccaggcagagccgcgcctcacttcccagacggggtggcagccaggcagaggctgcaatctcggcactttgggaggccaaggcaggcggctgggaggtggaggttgtagcgagccgagatcacgccactgcactccagcctgggcaacattgagcactgagtgaacgagactccgtctgcaatcctggcaccttgggaggccgaggctggcggatcactcgcggttaggagctggagaccagcccagccaacacagcgaaaccccgtctccaccaaaaaaatacgaaaaccagtcaggcgtggcagcgcacgccttcagtcgcaggcactcggcaggctgaggcaggagaatcaggcaaggaggttgcagtgagccgagatggcagcagtacagtccagcttcggctcggcatcagagggagaccgtggaaagagagggagagggagaccgtggggagagggagagggagagggagaaggagaagtacactattacgtatgctccagcctgggtgacagggcgagactccatctcaaaaacaaaaaaggagcgcaccagcatggcacatgtatacatatgtaactaacctgcacaatgtgcacatgtaccctaaaacttaaagtataataaaaaaaaagaaaaaaataaccattgtaccaccaaaaaaaaaaaaaagaataagaacattaaaacgtaagatgcatgatgaaaatctaagtggtggggctctttgtggttaacataatattgagtgatatatgaggtggttgtttagagtaatattcttctgcattatagtaaatgaaaaacatttttaatattagttaaaattagtaatatattattttactaattatatttctatgtaataaaatgcagtacgtttttaaattttcagactacatgtaaacttagttttataattaaacttttttaaacatattatgatcattgtgcattcaacgatgcgttgtgatgccactaagtttaacctatctaccgtactcaagaatgtagttaaaagatggttacagtgtgcaggttggtaacataatgaactaacatctcttttgccagtggctttaaactgcaaataggttaaagaatattgttcttgtaggttaaatttttattctttttttcttatatgaacttatttttaaaaatttttgtgagtacatagtatgtgtatatatttataccatatatagaatattttgatacaggcatataatatgtaacaatcacatcagggtaagtgaagtatccatcacctccagcattaccctttgtattacaaacctattctacacatttagttcttttgaaatgtgcaattgttattggttacagtaaccaatttgcatggaatgtctatttccatctggccactttggcaagtggcaagattttggtcatgattttgttttatggtcataataagaattgtatagaagtattaataaaatccatacatttctgaattctgaataaacatttaaaaatttgttaatatttttctttaaacatgtggtcttactgcctgcaaacacatacagactcttaatttttatttacatagatgtaaatatacacatatattactctaaagataaaccttaagggtaagaaaattataaagtatgtgtgtttttgtgaatatgaatttgtacctatattcagaagaaaagagcaatattggcacaaaacaaatcatcttaataaggtaactaattggctgtgtgcagtggctcacgcctgtaatcgcatcactttgggaggctgaggcgggtggatcacctgaggtcaggagttcgagaccagcctgaccaatatggtgaaaccccatctctactaaaaatacaaaaattacctgggtgtggtggtgtgcacctctagtcccagttactcaggagactgagacaagagaattgcttgaacccaggatttggaggttgcagtgaactgagattatgccactgcactccagcctgggtgaaagagtaagactcatctcaaaaaaataataaggtaactagtttactagaaaactgaatacctcaaaaatgctgaaaacaaatgtatactgtctgctttgtgttaaatttattactgtaatatcttatggtttatagttcagaatcttcccatgcaaatattttgttttgacttgcctgatactcatgctggacctataattttcttttttttataattttttttatagtttctgaggcattatgtgagcttgtcagggattataatgcttttataaaatttagtagtgcacacaaaataatatttatatgtaattccaaaattagtctatcaagttatattttattttcttagaacatttcatttgttcttttaattggagaactctttaaacctgctttagttgttgttcttttcactttttataattgaaataactatatttatttattgagccaatttttttttcaggtaaatactaaggatgctttataagtcatgaggatgtttttatatataaatatagcaaacaaacatgagagtgcttgctgtgtaacaaatgctgcataacaagctataaatattcctgctgaagttagtttgtaacttcaagtcagagatggaaaatatcaatggtgaaaaaataatattgatttttcatgttaaaaagacactttttccaggctacaaaactaactcttgctgaatttgaagagaaattcttcttcctttattttctaagtatcttttgttttattatgtgtattccagctatgtatgcatcacagcccttctccttctttttcagtattatatctatggttttctcattgttgtctttatgccatgtcattttacatggtactttgtaggttttgatgagaaagttggtatttttttaatgtactaaaaaattagttttaactggagagtttgtcaatacaactttcagatcagttaattaagataaaaggcattcagtatccacaggtgagaggaataagtcagttagttttctttttttctgcttgtaaaagaaaaaaaatcttacacaaagtgtggcaaatatttgctaaaaaatatatctcagaaattaaatttttaagaaagctaatggtgagtgaaattttttaaatttaattttctatgatatagcacaacttaacgtttccgtgcagaatcttctatttttaagtgtgaatgttaaagtttgtaaaataataaaatgacctctgtggatttaaaatttggaataatatttcttttttatattgatattacaatttgaaaaaatctctcagtcttatataatttttttagtgggtgaagttcagtctagagtttctattctttgtcacataactgtagccaacttattgatcattttctctgtaaaacttggagatcatgacagcttttggattgaaacatatcctattagtttgctcacaaacttgtttactgtgttcgaagagtggccagtcatgagaccaaagcaacaactgcccttttagtgtcttttatgcagttattatctgtaataaataaatatttattctgtaaaacatgaattttgaagtgtgtatacattgtcaaatgtttaattctaggtaattaatgctttacctcacatagttaacattttttgtggtgagagcacgtgacatagtcttagcacttttcaaaaatacaaatacattattaggaactatagccaccatgctgtagaaaaaatcttttgaaattatttctcctattcaagtataattatgtattttttgactgacgtctttccaaaccccccttctaaataccttggtatctggtggtcaccattttactttctacttccatgagattacgttttttgaggatccgtgtgtaagtaaaattatgaaataatctttctaggccgggtgcggtggcttacatctctaatgccagctctttgggaggccgaggcgggcagatcacaaagtcaggagtttgagaccagcctggccactgtgatgaaaccccatctactaaaaatacaaaaagtagctgggcatggtggcgggtgcctgtagtcccagctgaggcaggagaatcgcttaaacctgggaggcagaggttgcaataagctgagattgcaccactgcactccagcctgggcaacagagcaagactctgttgcaaaaataataataatcttgatgtgcctggcttatttcaggtaatgtaatccatctgactgaaaataatagaattttcttttttgaaggtgagtagtattccattgtttaaatatatcatacttttttttttttctttttgagtcagagtgtttctctgtagcccaggctggagagcaggggtgcaatctcggctcactgcaacctcccgctaactaacttttatatttttagtagagatgagttttcaccatattggccaagctggtcttgaactcctgacctcaagtgatccacccgcctcggcctcccaaagtgctgagattacaggcatgagccactgtccccagcctactatattgtctttatttactcatttgatgttaaactgttgattctatattttgacaattgtaaagagtgttgcaaacaacatagaagtgcaaattttttttattctgattgttttggatatatatccaatattacaattgctgtattatatgatagttttaaattttttgagacttctctattttttatttatttatttttgtttgtttgtttgttttgagatggagtttcactcttgttgccaggctggagtgcaatggcatgatctcggcttaccgcaacctctgcctcccaggttcaatcaattctcctcccttagcctcccgagtagctgggattacaggcatgcactaccacgcttggctaattttgtatttttagtagagacagggtttctccatgttggtcaggctggtctcgagctccagacctcaggtgatccacttgcctcggcctcccaaagtgctgggattacaggcatgaggcaccgtgctcggcctattttatttttataaaggctgttctcatttacactcaaaccaacaatatgcaaacattctttttcctttttctttttctttttttttcaagacggagtctcgctctgttgcccaggctggagtgcagtggcaatctcggctcactgcaagttccgcctcccaggttcacgccattctcctgcctcagcctcccgagtagctgggactacaggcacccgccaccacgcctggctaattttttgtatttttagtagagatggaatttcactatgttagccaggatggtctggatctcctgaccacgtgatccacccacctcagcctcccaaagtgctgacattacaggcgtgagccactacagccggcccccaagcattcctttgtcttcacacctttactaatttttttctttttaataagagttattctaacaagtgagttgatatcatagttttttctcttttttttttgcttttcctggtaataattgatactgattattttttatatctcttgcctatatgtcttttttgaaaaataagtctttaattcatttttaatattattttttattctataattgagtttcttatatattttgatattaaacccttgtcacatgtataatttgtacatattttctcccattttttagttttctcatcctgttgattgtatcagattctgtgcagcaactttttaatttgaagtaatctgactcctctaatttttctttggttccctgggattctgagattaaattttagaaagtcactgcccagaccaatgttatggggctttcactgtatattttttgtagtagtttcatagtttcaagccttacatttaaatatctaatttactttaagttgatttttatatatggtgtgaaatgagggtctcattttattgctctgcatgtggctatacagttttctcaacatcatttattgaagacattgtcatttccctaaaagattgtcacctgttaatataatcagctgtaagtaaatgaatacatttctcatttctctcttctgctccactggcctatgtgtctttttttattgcagtaccatactgttttggttactatagctttgtagcatatttcaaagccaggtagggtaatacattcagccttttttgttttgtttgatcgcttttgctactcagggtcttctgcagcaccatataaattttagatagatatttttaaattcctatgatgtttgtcactggtattttgatagaagttgcattatatttgtatatcattttgtataatgtaggtatttaacaatattaatgccaattcataaatattttcatttgtgtattatttattactttaatattctttagattataatgtaaggtgtttcaactttttggttacatttatctcaaagtgtagttactacagttattgtagataggattgttttttaattttattttgagatagttaattgtttacaaaaatgccactgacttttgcatgtggattttttattctgtaaatttaatgaatttattagtttctagtagttcttagtaaagtcttaggctttcctatacttaagattatgtcttctacaaatagtaataattcaacttttttttccaatctggatgcctttgattttattctctaatttctctgtcttggacatttcgtactatgtttagcaagactgaagaaagtgggcatccttgtcttgttctaactttcagagtaaaagcttacaacttttccctgtttagtatgctgtttcctgtgcactttttgttatatgtggcatttattggcttcaggtgcatttttcctatacttaattttttcagagatttatcattagggaatgtgttaaacttttgttctgcatctatttaaatgttgagttgtgaaatcacagctaactccacataaatacaaaacatcctcagagactactatgaacatctccatgcatgcgaagtaaaaaatttacaggaaatagataaactggatacacacaacctctcaagattgaaccagaaagaagcaaacatcttgaacacagcaaaaattaataaaatgtataatgaaattataaatttagcaatagaaattatacattatattatagaatagtaatagaaatcatacattagtaatagaaatatatacattggtaatagaaaacccgcgaaccatgaatagccctagatcagatgaattcacaactaaattctaccacatatacaaagatgaaccagtactaatcctctgaatgtactccaaaaatcaaggtgggatttcttcctaactatataaaaccagtatcaccttgatatcaaaatctagtgaagacacaacaacaacaaaaactataggccaatattttgggtgatcattaaaacaaaagttctccataaaatactagcaagctgagttcataatcaaatcaaaacgttattttaccacaatcctgggagatttacttcatgaatgcaaggatgtttcatcatatataagtcaataaatgtgattcatcaggtaaagatgattaaaagctaacatgattatcacaatagatacagaaaaggcattcaaaaaatccaatacctataaaaatattctcaacaaactaggtattaaagaaacatctcaaaatagtaaagccatctgtgacaaatctgcagctgaaatcatgctgaacaggcaaaagctggatgaactctccatatgaataaaaataagacaagaatatccactcttaacactcgtattcaacatagttctggaagtcctagctagagcaattaaacaagataaagaaataaaagagatctaaataagaaaagagaaagtcaaattattctcacagatgatataattctctacctgggaaactttggagatgccacaaaaagacccctaagcctaaaaaatgacttaagcaaagtctcaggatacaaaattaacatacacaaatgagtagcatttctgtacatgaataacattcaagctgagaacaaaataaaaaacacagttctggtcgtcagcaaagcctgagtcctgtcctcttgctctcctccctggacagcataagcttcaccactcgctcaaccttcaccaattaccagtccctgggctctgtccaggtgcctggccagtcagcagcacagccatcatctatgcaggcatggggggttctggttccaggatctccgtgtcctgcttcaccagcttcaaggcccatggggttcaggggcctggctgcggggatagccaggggtctgacaggaatgggaggcatccagaacgagaagaccatgcagaccctgaactactgcctggcctcctacctggacagagtgaggagcctgaggaccaagaaccggaaggtggagagcaaaatctgggagcacctggagaagatgggacctcaggtcagagacaagccattacttcaagaccatcaaggacctgagggctcagatcttcacaaatactgtggacaatgcccacatcgttctgcagatcgacagtgtccgttgtggggaaaagaaagagagatcagattgttactgtgtctatgtagaaaagcaagatagaagaaactccattttgatctgtactaagaaaaattgcttctgctttgagatgctgttaacctgtaactttagccccaaccctgtgctcacagaaacgtgcgtaatgaatcaaagtttaatggatttagggctgtgcaggatgtgccttgttaacaatatgtttgcaggcagtatgcttggtaaaagtcattgccattttccattctaaattaaccagggacacaatgcactgtggaaagctgcagggacctctgcccaagaaagcctgggtattgtccaaggtttccccccactgagacagcctgagatatggcctcatgggaaaggaaagacctcaccatcccccagcctgacacccataaagggtctgtgctgaggattagtgaaagaggaaggcctctttgcagttgagattagaagaagtcttctgtctcctgctcatccctgggaatagaatgtctcagtgtaaagctggccattcccattcattctcttctgagataggagacaaccgccctgtggctagaggcaagatatgctggcagcagtactgctctgttgctgtttgctatactgagatgtttgggtaaagagaaacataaatctagcctacgtgcacatctggacacagtacctttccttgaacttattcataatacagattcctttgctcacatgtttccctgctgaccttctccccacctgttgccctgttacactctcctcgctaagatagtaaaaataatgatcaataaatactgagggaactcagaggctggcgccagtgtgggtcctctgtatgctaagcactggtcccctgggcccactgttctttctctgtactttgtctctgtgtcttatttcttttctcagtctctcatcccacctgacaagaaatacccacaggtgtggaggggctggcccccttcagtccatcttgctgctgatgactttagacccaagtgtgagacagagctggccatgtgccagtctgtggagagcaacatccatggctttgcaaagtcattgatgacaccaatgtcactcggctgcggttggagacagagatcaaggttctcagggaggagctgctctttatgaagaagaaccacaaagaggaagtaaaaggactacaagccaaggtcgacagctctgggttgaccagggaggtagttgcccccaaagctcaggaccttgccaagatcatggcagacatccaggcccaatacgacgaggtagctcagaagaaccgagaggagctggacaagtaccagtctcagcagattgaggagagtatatagtggtcaccacgcagtccaccaaggttgtagctgctgagatgatgctcacagagcttagatgtacagtccagtccttgaagatcgacctggactcaatgagaaatctgaaggccagcttggagaacagcctgagggaggtggaggcatgttaagccctgcagatggagcagatcaacaggatcctgctgcacctggagtcagagctggtacagaccctggcagaggggcagtaccaggcccaggagtacaaggccccgctgaacatcaaagtcaagcaggaggctgagatcgccacctaccaccgcctgctggaagatggcgaggacttcaatcttggtgatgtcctggacagcagcaactccaagcaaaccatccaaaagaccacaacccgccagatggtggatggcaaaatggtgtctgagaccaacaacaccaaagttctcagacattaagccagcagaagcagggtaccctttggggagcaggaggccaataaaaagttcagaggtaaaaaataaaagaacagaattctatttacaatagccaaaaacaaaaaataacatacttaggaatacattaaacgaaggaggtaaaatatcgctacaaagaaaacacactgctgaaagaaatcagacaaaacacaaataaatggagaagcatttcatgcttatgaatttgaagatttaatataattaaaatgtccatgccacttaaagcaacctgcagatttttattcctatcaaactatcagtgccatttttatagaaatagggaaaaaagctattctaaaatttatatggaagaataaaaaaagccaaaatagccaaggcaacattaaacaaacaaacaaaataaaacctggaggcctcgaattacctgacttcaaactgtgctacaagctacagtaatcggtataacatggtcgtggtacaaaaatatacatacagactatattggtacatttttatgctgctaataaagacacacctgagactgggtaatttataaaagaaaggtttaattgactcacagttccatatgactggggaggcctcacattcatgatggaagccaaagggaaagcaagacatggcagcaggcaagagcaagcatgtgcagaagaactcccttttataaaaccatcagatcttaaaagacttattcacgacccagagaacagcatgggaaaaacccacccccatgatttaatcacctcccacccagaccctccaatgacatgtggggattattacaattcaaggtgagatttgggtggggacacagagccaaaccatgtggaacagaagagagagccctgaaataaagctacactcctacaacctacttttgacaaagtcaacagaaataaaaagaaaataactccctatctaataaatgatactgggaaaactcgttagtcatatgcagaagaagaaaaaaaactcttcctcccaccatataaacaatatatctcaatatagtttaaagacttaactgtgagacttcaagctattaaaactctagaagaacatgcagaaagtactcttctagacacagggctctagaaaaaaaattataactaacaccttagaagttaatgcaacaaaaataaaaacatgttgaggttgtggagaaaagggaatctatatacactgttggtggaaatgcaaattaattcagcccctgtagaacacagtttgaagatttctcaaatagctaaaaatagaatagctatttggcccattaatcgaattactgggtatatacccaaagaaaaaattattttaccaaaaagacactggcactcacatgtttactgcagcactattcaccataaaaaaagacagaattaaagtaggtacccatgaatcttagattcatgttctttgttaatttgcttagaataaaggccttctgccagcttggaggacagcctgagggaggtggaagcccactatgccctgcagatggagcacctcaatgggatcctgctgcacctgtagtcagagttggcacaggtccaggcccaggagtacaaggccctgctcaacatcaaagtcaagcaggcccaggagtacaaggccccgctgaacatcaaagtcaagcaggaggctgagatcaccacctaccgccgcctgctggaagatggcaaggacttcaatctaggtgatgccctggacagcagcaactccatgcaaaccatcaaaaagaccaccacccgccagagaatggatggcaaagtgctgtctgagaccaatgacaccaaattgagacattaagccagcagaagcagggtactctttggggagcaagaggccaataaaaacttcaaaggtcaaaaaaaaaaaaaaaagaataaaggccttctgctgcatccatgttgctgcaaagaacatctttttctgtggtttcttagtattgcacggtatatacgtatttcagatactacatgttctcacttataattgggtgctaaacattgggtgaacatggaaacaataaatgctgggagttcttaaaaaaactgccaagaccagcattgaaaaactacttatcaggtatgaggtacactacttggacaatggaattattaagtgcccaaacttcgacatcaggcagtatacttatgttacaaatctgcccatgtaccctcatgaatctaaaataaaaataataaaatgctttgtggtataatggcatgttatatttctccagttctgggttaatagttgaaattaggagtgaaagacacagaattatgtccgttttgggtacagaggtgaatgtttttatacctggtcgccccacgttttatgacctaacgtctctgaaaacccttggtttatagcccaaaaagtgtcttatccccaagtatgcagctaaaataaatggccacatctttatattgtatttattaactgtacactagattataatttgtcactctactctttttggggaaaaaatggtttaatcacatttctcttttagaataaaccatttttgaaaatgtgaggctgtgaaaatcatgttaaattcctgaattaggaaaataattttttttcttttttgtggagtctagctctgtcacccaggcttgagtccagtggcgtgaactcagctcactgcaacctctgcctcccaggttcgagcaattcttctgcctcagccctctgagtagctgggattacaggcacctgccaccatgctcagttaatttttgtatttttagtagggatggggttttgccatgttggccaggctggtctcaaactcctgacctcaggtgatctgtctgccttggactcccaaagttctggaattacaggtgtgagccactccacctggcaagaaaacatttatttttaagcataaaagtcttatggtcatagaccaaaaatgacaaagtacacggtatgggttatttatgaccacactgctgcaaccactctatcacaaccattctggtgaaataataataataataataatggattagaaggtacttttagaatatctttctgattctattgcaatgttaaattcttgtctttattatttgtcatatagaagtctgtacttcaacaaaagatgccaagaatttcaagttaatatcctcacacatatattctcactagaagggcactggtgtgtttgcaatcagggtggagcatttctggctttgcttgtgctactttgattgtctaaaatagaaagacaggaagtaaagtggagtcagccatgacatattgagcttctacagcaacaacatctgaattcttgtgttacgtcaactagaagtaatgacagtattttattttattttgttttatttatttatttatttagagacagagtttcactcttgttgcacaggctggagtgcaatggtgcgatcttggctcaccacaacctccacttcccaggttcaagtgattctcctgcctcagcctcctgagtagctgagattacaggcatgcaccaccacacccggctaattttgtatttttagtagagatggggtttctccatgttggtcaggctggtctcaaactcccgacctcaggttacctgcccacctcggcctcccaaagtgttgggattacaggcacaagccaccacatccggcctgttattttactatatttatttttaaaattgtaattcatttatcctgaatatatcactgggcccagaacctaggtgatgtgactctcctgcattatctctgcccataagtgggattattaaatatacctgggcctacataggtatacagatgctacaatgactcatatacctggacacagccaagagaagagattttgactctcataggttggcttacaacaatggataaggtcctgggtctcctacttgtaccaaagtcaaagagaataacaacattcacacatatcatataaattcctcaagtggcaccaaaagtgtcaacagggccaaccatgctgaagagactgtgactctcctatgcacacccagctgactgtaaggactgtcacccttccagatggacacagaccactgtggaggttttgaatgtcacaccaagagtgagtcaaaggttggaattgtgactctcacacatggatgtggtccacaggtggaataatgactcttggacctcaggtggaattggggctctcatgcagggattcagtccagcattcagactgctttgcattcttggacccaacccacaggagatactggctctcatacataacccgggatatgtgcaggattgtaaatgtcatccctggacctttctgcgggtgtaattgtgacagatatttttgcctagaatctgaatgatttgactctcctgcctgggccaagcccacaaatgtgattgtgacatatactcaggccaagcacctaggttatgtgactctcctgcctgagccctgccctcaagggaattgtgacatatcattgaacccagcacctaggtgatgtggctctcctctcctgcctgggccctgcctacagagaaaattgtgacatattcctcgacccagcactcagataatgtgactctcctgcctgtgcactgcctacacagggcatggtggcctatcgccaggcccatcaaccatgtgatgtgaatctcctctctgcctgagccctgccctaaggattgtaaaatattgctgggctcagcacccaggtaatgtaaccttcttgctttagcactgcccaaaggagaaattgtgacatctatctgggccaatcttctaggtgatgtgaatctcctctcctgccccctccctgctctgggactatgacacattactggactcagcacctaggcgatgtgactctcctctcctgtctaggacctgcccaattggtgactgtgacacatcactgggcctagcacctaggtaatgtgactcctcttttgcctggcccctgaccacaggttgcattgtgacatatcactgggcccagcacccagatgttactcttcttctgcctgggtttgttcacagatgggattgtgacatgtgcctgagcccagcatctaggtggtgttagtctcctctcctgcttaatacctgccctgggtaccgggcaaggcaatatgtcacaatgccccctgagatcagggcccaggaaaaaagtcacatcacctgtgtgctgtgcccagtgatgtgtcacaatgtcccctggggaatagagttcaggaaggagagtcacatcacctacatgctgcatctagtgatatatcactttcctgcctaggctctgcccacagaaggctttgtgacagatctatgggcctgtaatctaggtcatttcacttattttggggggaccttatgcacaaaagattgtgacatatttctgggcacagtacacaggtgaggtgacactcctgcctgggcctggcccacagaaggaattatatcactgcttccatcacctaggtgaggtaactcacctctcctgcctgggccctgcctaccggaagaattgtgacataacactgggcccagcacctaggtgatgtgactcttttgccttgttccttcccacaggtgagagtgcgacatacctgggctcaactcacagctgtgaaaataactcattcttgtacccagccaataggagagattttgattctcatagatacatttagggcaactggtaaggtcctgggtctcttacttttatgaagataacagaggattatgacactcacacatatcatataaagcccttgagtggtacagagagtgtcagaacataggagcagggcacagtggctcacacctgtaatcccagcactttgggaggctgaggcgggcagatcacctgaagtcaggagtttgagaccagcctggccaacatggtgaaaccccgtctctactaaaaatacaaaaattagccaggtgtggtggtgcatgactgtaatcccagctactcgggaagttgaggcaggagaattgcttgaacccgggaggcagaggttgcagtgagccgaggttgcgccattgcactccagcctgggtgacagagcaagagtccgtctcaaaaaacaaaaacaaaaacacagcactcagatgagattatgactctcatattcacactcagctgccagaattgtcaccctcaaacatggacacagcccactggtgaggtcctggatctcacaggagtacacagttggaattgtgactgtcatacgtaggcctggccacaggtgtgacgctgactcatttctggacacagcacacagggacaatgatgactttcatacctgaacccaaccaataggagagatgttgactcttgtacctaggacaatgagtaagatcctggctccataccagcacaaatttccagagcagatagcaactgtcttgcacactgtataaagcccttgggttacacagagtttcataacatggcccagcacacagaagcgattgtgactctcatatgcacacccagccaacagtaaggattgtcaccctctatcataaagccaccccgctgtcgaagttcttaatctcacacctggattcagtcaaaagttgaaattgtgactctcctacgtgaatgttttccacagttggataatgactctcagaccaggattcagaacactggtgaggctgtgactcctttactgaaacacagtcccctgcaggcaggattggggatcttatgcacaaatccagctaacccttaagactgactcatgtacttggaccaaactcacaggcattgactctcatacctgaagccaggacatgtgtggaattgttaagctcttctctggacctttccacagatgtggttgtgagatatatctttgcctagtacctgagtgaggtgcttctcctgcctgggtctggctcctaaataggattgtgagatatacctgggcccaagctctcaggtgatgtgactctcctgcctgggccctgtcataatgggggattttgctataatgctggacatagctaggtgatgtgactctcctgtcctatctgggctctgctcacaggtgagattgtgacacatcgctgagcccagcacccaggtgatatagctctgctgcctgggccctgcccacacagggcattacggtatattgccgggccaaacacccagtaatgtgactctttttctgggccttgtcctcagggtgcatggtgatatatcactggatctagcacacaggtgatgtaaatctcttgcctgggtcttgcccgtaggagatattgtaacatatcgctgggctcagcactcaggtgatatgcctctcctgccagggctctgcccacagtagggattgtgacatattacaggggccgacacctatgtgatgtgtctccttttctcccttggtcctaccctcaaagaagattgtaacttattgctgggccaagcacccaggtgatgggacacttcttcctgggccctgcccacagaggaaattgtaacatatttctgggcccagaaccaaggtggtataattattttgccttagctttgcccacaaaaaggattgtgacatattcctggcccagcatccaggttatgtggctctcttgccctgtctctgcccacatgtgggattgtgacatatcagtgggcccagaaccaaggtgatatgagtctcctgtctgtgctctgcccacaggggagattgtgacacattggtgggctcggcatccaagtgatgtgagtgtcttgcttggattttacccaaagagagtattgtgacacacctgtggatgtgacttttctgcttgatccctgcccacatttgaaattggggcctacacctgtttccatcacctaggtgatgtagctctccttcctggtccctgtccaaagggaggattgtaacacacctgcttccagcacctaggtaatgtgactttcctgcctgggccctgcctccaggtaattgtgacatatacctgaacccatcttctgagttgtgttgctcttcctcctgggtcccacccagagggtagattgtggcatgtacctgggtccagcacctaggtgatgttacactttgcctggacctagaacacaagaaaagattttgacagatttcttaccacagcacctaagatatgtgactccgctgcctaggctaaagccacaagtgggattacataatactgggccgagtactgaggtgatttgagccttttttaggtcaagttctcagggggactgacatatacctgggctcaggaattaaggtgatgtggctgtcctgcatgggcccaatccacagagaacattgtgacatatacctgggcccagaccataggtcatgcgactctctcacctaggtcaaggccacaaatgggatagtgacatatagttgaaccaagcacctatgtgttctgactctcatgcctggccaaagtcacaaggggcattgtgacatatacctgggcccagcacttagatgatgtgactctttagcctgagcccaccccacagggagtattgtgacacatacctgggctcaacacctatgtgaggtgtacatctaacctgggccaagccaacaaaagagattgtgacaatataccagggctaagcacctagacaatgtgtctctcttacctgggacctgcccatagtggggattgtgacacatacctggtacctaggctatgtaactcttctgcctgggctgaggccataggtgggattgtgatgtagagctaattccagaacctaggtgatgtgaatctccaacatgagcccaagcaacaggagggattgtgacacatacctgggcccagtacctaggtgatgtggctctcttgcttgggacctgccaaacaggggactttaatatacctgggccccacacctaggtgatgtgactcttctgctgggcctcgaccataagagagattgcgatatatacatgggcccagccttcaggtgatgtagctcttctgcctgagccaggctcacagggggaattgtaagatttagctggacccagctcacaggcaatgatgactctcatacctggacccagtgaagaggagacattctgactctcatagctagccttaaggaaataggtaaggtcatggatctcatacttgtacaaaagtcacagagaggtttgtgactctcaagcatatcacgtaaaactctcaggtggtagagtgtcataacagtgcccatcacgcaagtgagactgtggctctcatgcactcccagttgaaagttaggattgttactcttacacatggacacagctcactagtgaggtccccaattttatagccaaacatactggacagttggaattgtgactcttctatgtgaatcttgacacaggtgggatggtcattcatttttggaccaagcccacaggcatgatcatgagtctcatacctggacccagccaataagaaacatttttggccaggtgcggtggctcatgcctgtaatcccaacactttgggaggatgaggtgggctgattacgaggtcatgagtttgagacaagcctggccaatatgatgaaaccctatctctactaaaaatacaaaaattagccaggcgtggtggcacacacctgtagtccctgttacttgggagactgaggcataagaatctcttgaacccggaaggcggagtttgcagtgacctgaaatcgcaccatcgcactccagcctgggtaataaagcgagactctgtcttgaaaaagaaaaaaaaaaaagaaacattttgactcttctgttgggcttaaggccacaggtaagatcatgtgtctataccatcatgcaggtctcagggaagattgcagctctcatgcatgctgtataaagcacttggttggtacatagagtgtcataaaagaacccagcacacaggaaaaattgtgattcttgtatgcatactcaaccaaatgttagaattatcagcctcacacatgcacacaacccactgttgaggttctgaatctcacacccagaaaagttgacagttggaattgtgacactcatccatggatggagtccacaggtgtgatggttaatactgaatgtcaacttgattggattgaaggatacaaagtatttatcctgggaattgagaaaataacaaattatcccataacatttactaattatctgaagatagatcctcagaaaatatattactgggttaaatgatgtctatgtaaactgttcacagttacagccagatgactttccaaaagggctgtagcaggtccatcggcgctggcattctctgatgcacctgctgctctgtatctaagctctcctgcatattacattcttttaatttttgttgtcagtttgtgtctatatggcaaataaaatctcattgtccctttcactttcagtttttaaactgacacgtttgagtcacctttcagttgtttaagacctattaagattttctcttttttgagtcatctgctcagatctttggccctgtgatgggcattctcccaccctggagttttccagcatttgcccctttgccagttctgggattgttgtagttatttctccagactccctttaatattaaagaaaaaaaagcaattggccgggcgcggtggctcacgcctataatcccagcactttgggaggctaaggtgggcggatcatgaagtcaagagatcgagaccatcctggccaacattgtgaaaccctgtctctactaaaaacacaaaacgtagctgggcatggcggcgctcgcctgtagtcccagctattgtggagcttgaggcaggagaatcacttgaagccgggaggcagagactgcggtgagccaagatcatgccactgcactccggcctggtgacacggtgagactccatctcaaaaaaaaaaaaaaggcggggggatttgcatggggagaatcctatggaggaccaataaaatctcagagaagtgagctcgacataaagcaaagaaaatagactcgctttcagaatttttgacatttttgcctttttagtaaattatcaacactttggaaattatgttttatttcaatatttttcttttctttgcaaaataggtatacacccaaactcacacaaacacaattacttactccgtaactcctttacttctaagatttatccttagaggaatatatttgtatattttatccttgtaaaacaagactatcagtctgcatatattttgcaagtcagaaaggtgacatgtgcaaaaaaaaaagtggaataaaattttgtaaatactcattcaatattcagaaatacatggctttaaattgtacttttatataatcttcattattaccattataatggccctgtagttacaaaaagaataaaaatattaccaatagaaacaatattctttaaactgtttgatgtttaaagttattgaaaaaagggatccctaaaaatgttattcaactatgttaaccaatagtgtattgttatcatctgttacctacaagcttcagttaggttggataggttaacactggtaaaaaaataatactttgttcaatgcacaatagtagaaacaaaaacaattatgcttaattaaaacaaattaagttcacacagaatctaaatttttttttaaatccactgtatcttattattttaataagcaattggaaaaacaacttgaattgaagatctaaaatgtttctcccttactataatgcatggaatcttactctaaaaacctaccccatgtatcacatgctgttgttaatcaaccacaaagcacttccccacttagaatctcttgatatgtcttacatttcagtgtctatgaaaaactatgtgaatgatgcttgtctaatagagatgtgcctcttataggtctgatgaagcaaaaactaaccatgtgcttttgtatacacactaagaatgaaggcataacaagtgatctaagagttgaattgcagccgggcatggtggctcacgcctgtaatcccagtattttgggaggctgaggcaggtggatcatgaggtcaggagttcaagaccagccttgccaagatggtgaaaccccatctctactaaaaactgcaaaaattagccaggcgcagtggaaggtgcctttaatcccagctacttgagaagctgaggcaggtgaatcgcctgaagctgggctgcagaggttgcagtgagccaagatcgtgccactgcactccagcctgggtgacagagtgaggctctgtctcaaaaaaataaaaaagagttgaattgcatcaatgtttgcttttcaagaattttaattttttaatgcaaaaagtatgctttgaatgtaattataactctccagaagaaaaatcaatctcctccttttaaatgtacatacaaataaattaattttttggtaattctttatagaaacaaagtcttgctgtgttacccaggctggtctcaatctcgtgggctcaagtgtttttttcaccctagcctcccaaagtgctgggattacagacatgagccatggcacctggccttcagcaattttctaagcttcccaatgacacagtatattgtaaaaatatacacggtagcctgggtgcggtggctcatgcctgtaatcccagcattttgggagcccaaggcaggcagatcacaaggtcaagagatcgagaccatcctggccaacatggtgaaaccacgtctctattagaaatacaaaaataagctgggtgtggtggtatgtgcctgtaatcccagctactcagaaggctgaggcaggtgaatcactcgaacctgggaggttgcagtgagccgagatcatgccactgcactccagcctggcaacagagtgatactccttttaaaatatatatatatacacatatataatatatacatgtgtacatatatataatatatacatgtgtacatatataatatatacatgtgtacatatatacaatatatacatgtgtacatatataatatatgtatatataatatatacatgtgtacatatatataatatatgtacatatattatatatgcaataaatacattaagctacattaccataagaaatttggtcatgtagtgtttaaattacctatctcaatttatattaaaaaaactgaaaatcggggccaggtgcagtggctcacgcctgtaatcccagcacttagggaggtcgaggtggattgatcacctaaggtcaggagttcaagaacagcctgaccatcatggtgaaacctcatctctactaaaaatacaaacttagctgggcgtggtggcaggtgcctataatgccagctacttgggaggctgaggcaggagaatcgcttgaacccgggaggcaggggttgtagtgagccaagatcatgccattgcactccaggctgggcaacaagagctaaactccatctcaaaaacaaaacaaaacaaaaaaaaacctgaaaattaaaaaaaaaaaatagattttcttacatttacagaggtacttagtgttctgataaagttactgagtacaaatatctctagaaacacatctgaaaccatcacagaatagaaagtcataaagtagaaaactcacatctttatctggtgttcttgcgattttgaaaccaaatttcaatatcactactgctttcacacatttcagcaatgatgtagaaaggatttaaaatagtttcatacagagtttctctaaaagacaaatagtctcatgtcccccaatagcaatggaagacctgtcagattattcaacctcttataaaccataagatggacttcagctctaagtataagcttgaaggaagattaaattaaagtagaattcttgggggatttaagaccatgggacagaagctgccccactgtttgggtatgagaaaagaaatcaggcattttagaaactatttctattgcagcagaccttcctaaaccacattttatggtctggctttcttcttcacctttggacctcagctgtgtcatcttctttcactcccgcctacctaggtgctggctatggtctcttgtctttctaaattccaagattctttcctttgcttcagagagttgatcaggcccagattagacacagcaagatctgtcttattagaaaaaggaaacatgagttttgctggattctccaattaccagactagtacttagtactgtgcttactaaagaaaaagaatattacagataatgtaaagttaatatcaaaataccttttcttcgacagaatctttagaatatttagaaagtattttaaatttgtgggtccttagctcactacccagtagtactactgaatcaaaagctggtggtgaaaattggattttaaaatatgagcaacattttatgctactaaatttctataattaccactaaactagagtgaagaatgtcaatcattcaagaaaaaaaggttaatctcaaaataaaacatattgggcggggcacggtggctcatgcctgtaatcccagcactttgggaggccaaggtgggtagatcatgaggtcaagggttcaagaccagccaagaccactgcactacttttttttttttttttgagacagttttgctcttgttgcccagattgaagtgcagtgccatgattttggctcactgcaacctctgcctcccaggttcaagcgattctcctgtcttagcctcctgagtagctgggattataggcatgtcccaccacgcctcgctaattttgtatttttagtagagatggggtttcaccatgttggtcaggctggtctcaaactcctgacgtcaggtgaaccacctgccacggcctcccaaagtgctgggattacaagcatgcaccaccgcgcccagccaaaaaaattctttttttatactaacaaattccccaaattttctagacagcagggatctaaaactattcattgaaagcaaaattatgtttaggaatatggagcatatttttatgtttgttggcttcttgtaagttttcttttgagaagtatcagtttatgtcttttgctcatctttgtggggttatttattcttctttaattaatttttttataggttctggaaattagacttgtcaaatgcatagtttgcaaacatttactctcattctgtaggttgtctgtttactctgttgatagtttcttttgctgtgcagaagctctttagaatagttaggaagttgggaaattgtcactttttgtttttcttgcttacttttggagacttagtcaaaaattctttgccaaggccaatgtcaaaaaagatatttagtaggtttttttgtaggatttttatagtttgatgtcttaaatttaaatccttaattcatcttgtgttaatttttgtatatggcaaattgtaggggttcagtattatctagtatttttttccgcatacggttagctggttatcccagcaccatttattaaatagacagtcttatttccattgcttatttttgtcaatgttgtcaaaaattatatggctgtaggtgtgtagctttatttctgagttttgtattctgttccactggtctctgtctgcttttataccagtaatatgcttctttggttcctgtagccatatagtatagtttaaatttgggtagagtgctgtctctggctttgctctttttgcttaagattgttttgggtatttatgctctttattgttttatataaattttagaatagttttttttttaattctctgaaaagttttattggcagtttgatagagatagcattgaatctgtagattaatttggccaatggggtcattttaatattgattcttttaatccatgtgaatataatgtacttccatttgtttatgtcatctatgatttctcttagcagtattttgtagttctctttgtgataattgttcacctcctgggttatatgcattcttaggtatttttttgtggcaagttaaatgggattgagttcttgatttggccctcagcttcaataatattggtgaataaaaatgacttttgcgtattgacttggtattctgaaacactactgaacttgctgataagttccaggagctctttagtaaagttattaggtgtttttaggtatcaaattagataatccatagaaagagatagtttgactttttttcccgtaatttggatgccttttatttcttgttcttgactgattgttctgacgagaactattattaatattttgtcattaaaagtgaataaaaattctatcactctcctgcttctacttcccttaactcttacattacagccaaaagaaatctttacatttctcattttattacaataaaaatatgtattttaccagaaaaataaaacaagaatatggttaaaaaaaacccaaaacatatatcaaatttaaaattttctacaataaaataaaatcgattgaaacatgtaaaataaaagaaagcagccaggtgcagtgactcacgcctgtaatcccagcactttaggaggccaaggtgggtggatcacgagatcaagagttcgagaccagcctggccaacatagggaaaccctgtctctactaaaaatacaaaaattagccaggcctggtggcacatgcctttaatcccagcaactcaggaggctgaggcaggagactcacttgaacccgggaggcagaggttgcagtgaggcgagatcatgcctccgcactccagcctcagtgaaagagtgagaccctgtctccaaaaaaaacaaaaacaaaaacaaacaaaacaaacaaaaaaacaaagtgcaggtgagtgcttcgaactgaacaccttagaagccctagtccattgtggatgcactgaagccaagattgtcaccaaaactcagttctctgttctccagagtccaggatctgtaaaactctgcatttaaaaaagctctcaatgtttttccaggggagactgtgttcatctatatcctatctcttctcaccttgattcaaatcctacctgatctagcggtgctgtttctggttttgagcttagttttctgtaattctctttcttatttggattgtggtctggtcctagtcagaaaggaagtttaggtgactcaaatctctctagatccagagtcccatagtctattcctgacttacatttgttgttcattttcttaactaaggctgttcagcaagcatcaagagttaatgagaagaatacggttccaagggatcattactacaattctcaaagccatctcagggatataagccatttctcattccctagctcaaaataaaaccctaccaaagacacacagcttactatccctcattccaccactctttctgatcttaatatgaacagcccaaggccttatctggcatttgagtgcattacctactggaatgggaagagagcaccttgtcttttttcaaatagtttctcctcctcatctaagcttctatctgtaaaaaagatttgttgaaaatggagctggcaagtggggccttggatgaagaggtagagaagatcttggtcttcagtttcccattccatgttgaaactcaaatgaaatgtcctctctcttacacatccagactcagaatgcagggtgttatgctggacttgccttttataagcccctcagctgggtacggctcactcttatgacaagaaatttatttcctggagacattatggccttcataaggaatgtttcaggttgtgatttactgggtaccttagacacacataaggggagattttttcagggtcctgtcatagcatcaaaaaccaaaataacaaaaccagccaggtgaggtggctcacacctgtaaccaaagcacttagggaggccaaggtgggtggatcacctgaggtcaggagttcgagaccagcctggccaacatggcgaaaccccatctctactaaacatacaaaaattagccaggtgtggtggcgagtgactgtaatctcagctactttggaggctgaggcaggagaatcgcatgaacccaggaggtggaggttgcagtgagccgagatcatgccattgcactgaagcctgggtgacaagagtgaaactctgcctcaaaagaaaaaaaaaaaaccagtaggcatgaaaattgaaagtcaagagactcatccccttttgatttctagccctcttttcacccagaactattaaaaaccttggccagattttaaaatgctaaattaaacagaccatatattaacaggtatatttaaattgtacacataaagaaaattacataaaggccaggcacggtggctcacacctgtaatctcagcactttatgaggttgaggcgggcggatcacttgaggccagaagttcaaggccagcctggccaacgtagtgaaaccccggctttactaaaaatacaaaaatgagctggatgtgggtgacatgtgcctgtaatcccagctactcgggaggcagaggtgagagaatcggttgaacccaggaggcagaggttgcagtgagccaagattgcaccattgcactccagcctgggtgacagagtgagactctgtctcaaaaaaaaaaaaaaaaaaagaaaaaaaaagaaaaaagaaaattacatataccattaaaattgtatacctatatgtcacaatttttcaaatgcttggaaatgacatatcaaattatagttgattgcatttgataaatatacaataaaataaaatgcagaacaaccaaactccaaatagaatatgcctttgtctcttgaatgttgaagagatacttaaatcaaatgtgatcacattgaattgatcagataggagccagtgctaactcaatcaaccactgattcctaaggcagcaaagagcccagctggagaagcaagcttctcctctacctcaccctccctcagtcatcctgggtgctacattgtcttctgtagaatttgctcagcattcactatctgagctgacaaatttggctagattattatcacaaccctaacacattttggttctttgttcttgtttctttgtttaaaataggttgtggatataactattacatcatgaaacttttttttttttttgagatggtgtctagctctgttagccagactggagtgcagtggcgtggtctgaactcactggaacctccacctcccaggttcaagcgattctcttgcctcagcctcctgagtagctgggattacaggcgcctgccaccacacccagctaattttttgtatttttagtatagatggggtttcgccatgttggccaggctggtctcaaacttctgacctcatgatccgcccgccttggcctcccaaagcactgggattacaggcatgagccaccacacgtagcctacatcatgaatctttagaaacccagtatggtacttgtctgggtctagtcctaaaaataataaacagatccaaaaaactgttgcaacattaacctttgaaagctgcctgtgatgatactgactcactgacctcctttctcctcaatccacagagaaagtgcaagaaccaccaggtcttagggcacatggccaggaccaggaggtacccagtgaagtgctctaatgtggtcctgtcccacagcccctgaaccaaataaggacaagcagaacctgaaaccaaggaaggcttgggaactgcagactccaggactctttactaagactaacaggaggaatgaaggcaaagatcagatacctgcagggttgaaaccgtacccagactttggaattttagtgtctccttctttactctgtgtccacagccctctttaagagtggagagagaaacataatagaaatacatgaagagtctgggtgcggtggctcacgcctgtaatcccagcactttgggaggccgaggggggcagatcatgatgtcaggaaatcgagaccatcctgactaacacggtgaaaccccatctctactgaaaaatacaaaaaaaaaaattagccaggcgtgcctatagttccagctgctcaggaggctgaggcaggagaatcgcttgaacctgggaggtggaggttgcagtgagctgagatcgtgccactacactccaacctggtgacagagcgagactctgtttcaaaaaaaaaaaatacatgaagagcccagcatactcctgagttcctctctcaggagctcattctattcctggaggatcattgtgagcaggtgtatgaggataccttgaaactgcatgtggcaggcacaattgcagtagattacaaatgaaagcccatcttgattggacatgaagaaaccatgcaaggatgcttggagttgggggctggatttgacatgaaggcagaagataccttcacaaagttcagaagaccttcattgctttcctcacagcaaaatatgagcgaggacagtgcccctgctgttccttccctgggtggtgacagaaagttgagacacatacaaacacttaacatagtttactcagcaagcaagaaaatcttggaaggaagattctactgcagaatttgtgcagcagatatgaactgaagcatcagcaaaactgaaaagtaatgagagaatctggtggctctgaggtgtttttttccctttgtttcctgcttagttgctctttgaggatcccctgacttgttttactcctgtgccctttatgaatgagtgatgatcatcttaaaaatcaggatgttcggccaggtgcgatggctcacgcctgtaatcccagcactttgggaggccgaggcgggtggatcacctgaggtcaggagttcgagcccagcctcaccaacatggtgaaactccatctgtactgaaaatacaaaaattagcctggcttggtggtgtgtgcctgtagtgcccactactcaggagcctgaggcaggataattgcttgaacccaggaggcagaggttgcagtgagccaggattgcaccactgcactccagcctgggtaacagagagagactctgtctccaaaaaaaaaaaaaagaaatcaggatggtaaaaaatatttttcatgtatgtgtaccttcctttttactcttcttcctcttcttcttcttcctcttcttcttcttcttctccttcttcttctccttctcctcctcctttttctcctcctcctcctccttctcctcctcctcctcctttttctcctcctcctcctcctcctcctcttctccttctcctgctgctgctgcttttttggattcttctgcttctgttttctttttctctttgctattatgtacatgcccaccaagaacatgctaggtatggggatttctgcacagatgttcaagtgttttatgagatgccttccaggaggtagaatcctttatgtaagatcatgtgtctttccacgcttgatacatattttaaaattatctttcaaaaggtaattggccatttatactccttacaagcatgcacaaaacagcaggtttcctctgataacatagagaccgtattaaggaacatttaaatttccaaactgatggtcacacaaactcatatattttgtaattattttttaaccaccattaaagttggatgcctctttatgtagacaatgacaatttttacttcttttactgtgaaatgttattataggtcccgtgtctttttgtaattaagtttgtaattttgctcttaatttttaggggtggctaacaccttttatttgaacaccatatctcccacatcattctagcagggtagtgcctatccacaaatcctgagaatagatttgttctgaatctgctgtcatgagttagcaagaagtcaataaacccagagtgtcatccatccgcctagcagggcctcttatcaagtcatgaactggtttctctcttaattcatgaacagctgaagaactgaaggtggatttattaattggccccatgctttacctaaccacttgggccaggactcaaccctctttgccaagctgactatcaacaggcttgaagtttgctctcataatgtaccctagtgtgccaccaagacacctgtcctggccactacaacttgtcttatggttgtcttggtataaatgcaaactcagattgcttgctgtcgagcatatatgtggccaggacagcaaatctagcattcaggaatgaggcaagaggccttcccagactcccaaatgaacttttcagaattttccaaaaatgctgagactcagtactttccagaccccactctccaaaagaatcatagatgggatctgggaaccattcagacactcaagcctcctctgcagtgaaaatgaacttggacctaaagaggcaaccctttgtccacaggtcaccaagaatgctgagcatcgatctcctccctccccatgggagaccttacctcagttccatcaaagcccatattgtttcccaacctccacaatccagacatgttctagagtaaactctcagaattgtcttgagatgggacaagggctggtggagctccaggttcagaatggcggcatcattttccctcctgagaagtttgcacctgctgatcagagcccttacctcttagggggcttagcccatgtccaaggaagtaccccctaactggatctcccagtctcttcctcctctaaggagagtgcccatgagaccctctatgctagggaatacatgacctccattcttacgtaacttggttgactgataaacggataccctgagaaacaagaagatgcagggaacatcttggttctggttaatctgtgctccttagctgaggtgcctgtgcaaatgctggaacccaaaataatattgggtggtagacacacagacactgcctaataaaattatgtaagtttatgtttaacataaatagaatttataatgttatataaaaatgttgctacttaattttataagaaaattcagtcagatttttataaaggcattacaatctaattttaatgagaagctatgaaaattatgtacacttggtgtgtaaatgactgagttttgggtaattctgcaaaggccaactatgaatgtgagtcattgttaaccaaatgctcttacagataccatattgcacacctgttttaatttgttcttttacctgaggtcaatttttcataattttaattatcaaattttatacactttagataaaagaaacctttgcagttaccatgtactctgttggtctgtagtttgttagaaatacaaaatttcagacaagatacaggtatgttgtatcaaaacctggattttatgtatttccaggtgattcacatgcacattaatggttgttatgttggagtaattctattcttaaaaggggaaataattatatgggtgtactggtttgtctaaaaggtataactaagatggtacgtttcagtgcctatacatcctatctcacacacacacacacaaaaactgagaaaaaagtggaaatggggaatagattgaagtagagattaaacaaaaatgacacataggccaggtgcagtggctcatgcctgtaatcccagcactttgggaggccgaggcaggcagataacctgaggtcaggagttctagaccagcctgaccaacatggtgaaatcctatctttactaaaaatataaaaattaggccaggcgtggtggctcacacctgtaatcctagcactttgggaggctgaggcgggcagatcatgaggtcaggagatcgagaccatcctggctaacatggtgaaaccctgtctctactaaaaatacaaaaaattagccgggtatggtggcatgcacctatagtctcagctactcaggaggctaaggcagcagaattgcttgaacctgggagatggaggttgcagtaagccgagatcatggcactgcactccagcctgggtgacagtgagactctgtctcaaagaaacaaaacaaaacaagacaaagattaaccaggcatgatggcacgctcctgtaatgccagctactcaggaggctgagacaggagaattgcttgaacccaggaggcggaggttacagtgagccaagattgtgccattgcactccagcctggttgacagtgagactctgtttcaaaaaaaaaaaaaaaagacacacaattagcagatattgaagttgagcatcagtctattatgctattatggttattgtgtaaatgtttaaagtattctgaataaaacacatgtatgaagagataaagttgatctacaacattagctcttaagattgtggttcctggctaagcacaatggctcacacctttaatcccaacactttgggaggtcaaggtgagcagatcacttgaggtcaggagctcgaaaccagcctgggcaacttggtgaaaccctgtctctactaaaaacacaaaaattagccaggcatggtggttcacacttgtaatcccagctactcggaaggctgaagcatgagaattgcttgaacctagaaggtggaggtttcagtgagccaagatcatgccactgcactccaacctgggcaacagagcaagactctataaaaaaaaaattttagggagtggacaagatggccaaatagaaacagctttagtctgcagctgccaacaagagaccaatgcagaaggcaggtgatttctgcatttccaactgaggtacccagttcatctcattgtgactgcttaggcagtgggtacaacccacagagagtgagcagaagcagggtggggcgtcactttgcctgggaagtgcaagggactgggatccttcctccctacccacagctaagggaagccatgaggaactgtgctgcccagctgggttactatgcttttcccacagtttttgcaatctgcagatcaggagatttcctcctatgcctgcacaactagggccctgggtttcaagcacaaaactgggtggctgtttgggcagacactgagctagctgcaggagtttttttttcataccccagaggcacctggaaccccagcgagacagaaccgttcactcaccctggaaagggggttgaagcccgggagccaagtggtctctctcagcaggtctcactcccacagagctaagcaagctgagaaccactggcttgaaattctcagtgctagcacagcagtatgaagttgacctgggcgattgagcttgggaagggcatccacccccattactgaggctttagtaggagattttcccctgaaattgctaaggaggctgaaaggtctgggctggatgtggcaaaatagctgtggtcagactgcttctctaaattcctcctcactgggcagggcatctccgaaggaaaggtaacagccccagtcaggggcttacagacaaaacccccatctccctgggaaagagcacctgggggaaggggcagctgtgggcacagcttcagctgatttaattgttcctgcctgctggctccgaagagagcagctgatcctgacaagagggattctgccagcacagcacaccagctctgctaagggacagactgcctcctcaagtgagtccttgacccctgagcctcctgactgagagaaatctcctaacagggttcaacagagacctcataaaggagagctctagctggcatcaggccagtgcccctctgggatgaagcttccagaggaaggagcaggcagcagtctttgctgttttgcagcctccactggtgatacccaggtgaacagggtctgaagtggacctccagcaaactgcagcagacctgcagaagaggggcatgactgttagaagaaaagctaacaaacagaaagccacaacatcaacaaaaacataaaggacccccacacaaaaaccccatccaaacctcatcagcctcaaagatcaaaggtagataaatccatgaagatgagtaaaaaccagtataaaaacactaaaaattccaaaaaccagaatgcctcttctccacaactcctctccagcaagggcacaaaagtggctggagaatcagactgatgaattgacagaagtaggcttcagaaggtggataataacaaactcctctgagctaacagagtatattctaacccaatgcaaggaagttaagaaccttgataaaaggttacaggaactgctaactagaataaacagtttagagaggaacttaaatggccagatggggctgaaaaacacagcacaaacacaagaacttcatgaagcatacacaagtgtcaatagctgaatcaatcaaacagaagaaaggatatcaaagattgaagatcaacttactgaactaaggcatgaagacaagcttagagaaaaaagaatgaaaaggaatgaacaaaccctccaggaaatatagcactacatgaaaagaccaaacctgtgattggttggtgtatctgaaagtggcagggagaatggaaccaagttggaaaacacatttcaggatattacccaggagaacttccccaacctagcaagacagaccaacattcaaattgaggaaatacagagaacattgctaagatactcctcaagaagagcaaccccaagacacataatcgtcagattctccaaggttgaaatgaaggacaaaatgttaagggcagccagacagaaaggtcaggttaaatacaaaggtaagcccatcagactaacagcagatttctctgtgaaaatcctacaagccagaagagagtacgggccaatattcaacattcttgaagaaaagaattttcaacccagaatttcatatccagccaaagtaagcttcataagcgaatgagaaagaaaatcctttacagacaagcaaatgctgagggatttcatcaccaccatgcctgccttacaagagctcctgaaggaagcactaaatatggaaaggaaaaactggtaccagccactgtaaaaacacaccaaaatataaagaccaatgacactatgaagaaactgcatcaactaacatgaaaaataaccagctagcatcatgatgacaggatcaaattcacacataacaatattaaccttaaatttaaatgggctaaatgccccaatttaaagacatagactggctaactggataaagagtcaagacctatcagtgtgctgtattcaggagacctatctcacatgcaaagacacatataggctcaaaataaaggtatgcaggaatatttaccaaacaaatgaaaagaaaaaaaaaagctggggttgcaatcctagtctctgataaaatagactttaaaccaaaaaagatcaaaaaataaaaagaagggcattacataatggtaaagggatcaatgcaacaagaagaattaactatcctaaacatataagcacccaatacacgagtgcccagattcataaaacaagttcttagagatctacaaagagacttagactcccacacaataatagtgggagactttaacacccctctgttaatattagacagatcaaggagacagaaaattaataaggatattcaggacttgaactcagctctggaccaagcagacctaatggacatctacagtactctccacaccaaatcaacagaatataaattcttctcagtgccacacagcacgtattctaaaattgaccacataattggaagtaaaacgttcctcagcaaatgcaaaagaatgaaaatcataccaaacagtctctcagaccacaggacaatcaaattagaactcaggattaagaaacgcattcaaaacctcacaactacatggaaattgaacaacctgctcctgaatgactactgggtaaataacgaaatgaaggcagaagtaaataagttctttgaaaccaatgagaacaaagacacagtgtatcagaatctctgggaccagaatctaacacagctaaagcagtgttaagaggtaaatttatagcactaaatacccacaacagaaagctggaaagatctaaaatcaacaccctaaaatcacaattaaaagaactagagaagcaagagcaaacaaattcaaaagcgaacagaatacaagaaataactaataccagagcagaactgaaggagatagagacacaaaaaaccttcaaataatcaattaatctaggaactggttttttgaaaagattaacaaaatagatagactactagctagactagtatagaagaaaagagacaagaatcaaataggcacaataaaaaatgataaaggggctattaccactgatcccacagaaatacaaactactataagagaatactataaacatctctatgcaaataaacttgaaaatttagaagaaatgaataaattcctggacacatacaccctcccaagactaaaccaggaagaagatgaatccctgaataaaccaatagcaagttctgaaactgaggcagtaattaacaggctaccaaccaaaaaatgcccaggcccagatggattcacagctgaattctaccagaggtacaaagaggagctagtaccattccttctgaaatgatttcaaacaatagcaaaagagggactcctccctaactcattttatgaggctagcatcatcctgataccaaaacctggcagagacacaataaaaaaaaaaatttcaggccaatatccctgatgaacatcaatgcgaaaatcctcaataaaatactggcaaaccaaatccagcagcacatcaaaaagcttatccaccatgatcaggtgggcttcatccctgagatgcaaggctggttcaacatacacaaatcaaccaacataatccatcacataaacagaaccaatgacaaaaaccacatgattatctcaatagatggagaaagggcctttgataaacttcaacatcccttcatgctaaaaactcttaaaaaactaggtatggatggaacacacctcaaaataataagagctattgatgacaaacccatagccaatatcatactgaatgaacaatagctggaagctttccctttgaaaaccggcacaagacaaggatgccctctctcaccactcctactcaacatcatattgtaagttctggccagggcaatcaggcaagagaaaggaataatgtgtattcaaataggaagacaggaagtcaaattgtctctgtttgcaaatgacatgattgtatatttagaaaaccccatcatctcagcccaaaaactccttaagctgataagcaactttagtaaagtctcaggatacaaaatcaatgtgcaaaaatcacaagcataggcctggcatggtggctcgtgcctgtaatcccagcactttgggaggctgaggtgggcagatcatggggtcaagagatcgagaccatcctggccaacatggtgaaatgccgtctctactaaaaatacaaaaattagccaggcatgatggtgtgtgcctgtaatcccagctactcatgaggctgaggcaggagaatcgcttgaacccaggaggcggaggttgcagtgagccaaggttgcaccgctggactccagcctgggtgacagagcaagactccgtctcaaaaacaaaaagaaacaaaaaaaacacacaagcattcctaaacaacaacaatagacaagcggagagccaaatcatgactgaaatctcattcacaattgctacaaagagaataaaatatctaggaaaacaacttacaaggcatttgaaggacctcttcaaggagaactacagaccactgctcaaggaaatgagaggacacaaacaaatggaaaaacattacatactcatggataggaagaatcaatatcatgaaaatggccatattgaccaaagtaatttacagattcaatgctattcccatcaagctaccagtgactttctttgcagagttagaaaaaactactttaaattttgtatagaaccaaaaaagagcccgtatagccaagacaatcctcaagatgaattgaagacttaaatgtaaaaccccaaatcataaaaatcctaaaagaaaacctaggcaataccattcaggacataggcatgggtaaagacttcatgactaaaacactgaaagcgattgcaacaaaagctaaaattgacaaatgggatctaattaaactaaagagcttctgcatagcaaaagaaattaccatcggagtgaaaaggcaacctatagaatgggagaaaagttttgcaagctacccatctgacagaggtctaatatccaaaatctacaaggaacttaaacaaatcatttatgtggccaacaaacatatgaaaaaaagctcatcaggcccagagcagtggctcacgcccgtaatcccagcactttgggagaccaaggtgggtagatcacgaggtcaggagttcaataccagcctagtcaagatggtgaaaccctgtctctactaaaaaatataaaaattagccaggcacagtggcaggcacctgtaatcccagctacttgggaggctgaggcaggagaattgcttgaacccgggaggtggagtttgcagccagctgagattgcaccactgcactctagcctgggcgacagagaaggactctaactcaaaaaaaaagaaaaaaagaaaaaaagctcatcatcactagtcattagagaatgcaaatcaaaaccacaatgagataccatctcacaccagttagaatggagatcattagcaagtcaggaaacaacagatgctggaggggatgtggagaaatagaaatccttttacactgttggtgggagaataaattagttcagccattgtggaagacagtgtggcaattcctcaaggatctagaactagaaataccatctgacccagcaatctcattactgggtatatacccaaaggattataaatcattccactataaagacacatgcacacatatgtttactgtggcactgttcacaatagcaaagactcggaaccaactcaaatgcccatcaatgatagactggataaagaaaatgtggcacatatacaccatggaataccatgcagccataaaaaatgagttcatgtcctttgcagggacatggatgaagctggaagacatcattgtcagcaaactaacacagaaacagaaaaccaaacactgcatgttctcactcataagtgggagctgaacaatgagaacacatagacacagggaggggaacatcacacattgaggcctgtctgagggggcaaggggagggagagcattaggacaaatacctaatgcatgtggggcttaaaacccagatgaccagttgataggtgcagcaaactaccgtgtcacatgtatacctatgtaacaaacctgcatgttctgcacatgtatcccagagcttaaagtaaaattttaaaaataataaaaattaaattaacaaaaaaagattgtgattacctttagggaggagaaggaaaagaggctgaaaatggtggttgggggcataaacaaggctaattctattctatggttaaacaaatgtgtttgccttacaatgatttattaagctttatattaatgctttgtgcatgtatttctgtatgtatgctatacattaataaaaatttaaatattacatatttaatcctaacaatatttcagaattacagtaatgtttggtattattttgttttaaagtggggcattttcatgcaggtgttctgagatggatattaatattccaaggtatatctttatgttctgtctcttgggagacccataaggttttccaatttctacctcaattaagtagcactgttttaatttggaggatgcaattttttacagcaaagtcttctccccacgatagtactcaccaaggccaggccgcctagcacagtgccctgcacgcagtgtgcacccagtctgtacagaactggtttgaatcaggaacaaaacaagtagcagaggtcagttctacaaatgatagaaagtaggtacacaatgaagactgaaaggctacactcaacagcaaacacttttgcatttatttggaaaatattttaaactagctcaccaaatgatgttcatgtcaagcagtgatttgggagtttggctgtgactgtaacctcctggagagctttaaatcacattgtctcctgggtctcactccaggattttggctaattgtgccattgcaacttgagtttggggactttaaacatcccaccttcaggttgctctaatatccaggcaggggtaagaagcatttattcagggtgaagaatgcattgcttgtgtgtgatttttatgtgtgcttcaggctttgccccatagctgctcctaaatttgtgggcttagaaaacatctttgcccttcaaagtatacacagctgtttggctaaattgcagcaggagaaaatatcagcagctctatctatgtcacttacctttcgagtaagaggttgtttcaggcacagtaatttgatttcttctgtgttgaaaattataaatagcctagaactaccagaaagagatacaaagattttgcagatgtgtggagtgcattataggtgttttcaaatttctcttataatgagaaataaaaaacataatattaggccttaatttactaaactcagtgttcagccattttctcaaatggtttatagtttttccaagagacttcagcagcattctctagagggaatgaattcccccaagagtgctaactggatgggatgagaataaaacataatcttgcttctatttcagaagtgtccctctacagagccttttttttttttttaggcggagtctctctctgttgcccaggctggagtgcagtggcatgatctcggctcactgcaatgtccgcctcccgggttcacgccattctcctgtctcagcctcccgaggagctgggactacaggcacccgccaccaggcccggctaattttttgtgtttttagtagagacggggtttcaccgtgttagccaggacggtctcgatctcctgaccttgtgatccacccacctcggcctcccaaagtgctgggattacaggcgtgagccacgcgcccagcctccagagtcttgatggactagaaaacgtggctgagtagtgtggtctgtggaagtgcatgagctctggactcagatagagttaatccttaatcccagcccagctgcttagtagctgtgggacagttaaataaaccttatctgcaaataaaagcataataggccgggcgcagtggcttacgcctgtaatcccagcactttgggaggcagaagcgggcaaatcacgaggtcaggagatcgagaccatcctggctaacagggtgaaaccccatctctactaaaaaaatacaaaaaaattagccgggcgtggtagcgggcacctttagtcccagctattgcggagcctgaggcaggagaatggcatgaacgcgggaggtggagcttgcagtgagccgagatcgcgccactgcactccagcctgagcgacagtgagactccgtctccaaaaaaaaaaaaaaaaaaaaaaagcataataaaattgattgaaaaaaacaattatttttattcattctcatatccatgcccttagcatatgattttataatagttcccatcaagagacaggatctgttttctaaatcttggatctttctggccttatttgcacaggccaaaactgaaatgacagcatgtcagttttgagcctaggctcaaaacgtcttaaatgtttctaaaatgggtcttaaaagctcatttttgcttgctgaaaaataaaagtatcacaaggagaaaaattgaagtgccccagttgacaggtagctcactctcagaagcagaaccacccaatctgccagcagctgaccactcatgcctgaagcccagcctaaatttctaaccagttcaatgatgagctagtaagttttaggatagtttgttatgcagttataccttactaacataaacattcattatagacagggtatcaggattccaaaaagattcattgcaaataacctgcaaatggtctgcaccttataagtactgattttcttttccatttatttaaagttagatttctgttaggtggtattgaattatacagaagagcaagtagatgtatataattggtgcttaaactcacacagtgccccataccacaggagaaaaacatacagctacagccagacaattaggtccgaggccaaatagcaaaataaggagttgacctttgtattaatttattttcacactgctataaagacatacctgaggccaggcacggtggctcatgcctgtaatcccagcactttgggaggctgaggcaggtggatcacaaggtcaggagatcgagactgtcctggctaacacggtgaaaccccgtctctactaaaaacacaaaaaattagctggttgtagtggcaggcacctgtaatcccagttactcgggaggctgaggcagaagaattgcttgaacatgggaggcggaggttgcagtgagcacagatcgcgtcactgcactccagcctgggcgacaagagtgagactctgtcaaaaaaaaccccaaaaaacaaacaaacaaacaaaaaaactacctgaaacagagtagtttatgaagagaagagatttaattgactcaaaattctgcatggctggggaggcctcaggaaacgtacaatcgtggcagaaggcaaaagggaagaaaggcatgtcttcaacaggtggcaggagagagtgaaagagagagaaagcactatagacttatcaaacaaccagatctcctgagaactctatcagagagcagcaagaggaagtctgcccccacgactcaatcacctcccacaaggcccctccccgacatgtggggattacaactcaagatgagatttgggttgggacaaagagccaaaccatatcagcctttaatctattccctccacatctgaactttggaggtcaacactgtgaagagatgtgaagacatggggtttcctccttctgaggccctatcatccattgtttactgtctgatatttggaagagaaatcccctccaaacagcaactgggacacagtggtctacatgtggacacttcctgcttgcagctgctgctctgtctaagggcactgtgcctcccacccttgggcctgaacagagaagtttataggcagaggctgttctctcacttccagcagaaaaaggatattcaggtcctttacctctttgaggtcagagagtcacagtcttcagagatgcacttcaatgtgccagctacttgccatttgaggctactgggtacctggaatgtggctgatttaaaatgagatgtgctgcagatatgaaatagagtcagttaagaaaatttagaaccaaaaatcactctattaataattacatactgggctaggcacggtggctcacgcctgtaatcccagcactttgggaggccgaggcgggtggatcataaggtcaggatatcgagaccatcctgccaacatggtgaaatgcgtctctactaaaaatacaaaaaattagttgggcgtggtggtgggtgcctgtagtcccagctactcgggaggctgagggagaagaatggcgtgaacccaggaggcggagcttgccatgagccaagattgtgccactgcactccagcctgggcgacagagtgagactccatctcaaaataataataataattattattatcattattatatattgggctgggtgaggttgctcacacctgtaatcccagcactttgagaggccgagatgggtggatcactgaggccaggagttcaagaccagcctggccaacatggcaaaaccctgtctctactaaaaatacaaaattagctgggtgtggtggcccacatctgtaatcccagctacttgggaggctgaggcagaagaagtgattgaacccaggaggcagaggttgcagtgagctgagatcacgccattgcactctagcctgggcaacaagagcaaaactctgtctcaaaaaaaagatgatgataataataattattatatgttgatcacacatttattcccagtgttccattattggaacactaagcatatgggagttatttatatctcactgctcaaggtcattgccaacgtctgactgcaaaaattttaaaaattgcaacctcaggcataaatgggttaaaataataatattttggatgtactgggttaaaaaataatttcacttgtttctttttattatgtttaatgtggctactaaaatatttaaaattcacacacggctgacattttatgttttagaggattgcttttcttttaaaatctcaggttgcctactcagaagatcaggggccggaagtgttatgaaatattaaatattaaaataattgccattatagtgtttccatttgtaaacaacatatatgtgtgtgtataaaatttataagtggacctaaccttatacacaagattaaaaaattacccccaggcagagctaagcccagctcagaggtaaagcccttgctggagatgactggagccaagagtctgtcactcttgcctcattcagtgcactgtctggtagcatcttctgtcactcaaggcccgagggcgcggggccgggagctctatccaatcagggtgctgggatggaaactgtccaatcagattcacagccagagaggaaggggcggctcccggtatctggcggggcctttgtctttcgctccaggtagagcttggggttagtacatcactggcctgcgtgctccgctccaggaggtctcggtgattctgccacagcctcatcctccgtcgccctgtgacctactggtattggaacattcatagctaagactccaggacacccacaaagccgagaaatgctgagtttgcgggtcagggcgtccggagactggggaggcctcatcggagtcggccggaaatggcggtggcgggaccgagtctgtgagcctgagcccccctcagctcagccctcagtctcctctggtgcagggtacccaggcgtcctgtaccgtttcagcacagcggctttggccccagcctgtagccctctttgcgcagctctgcgcccgcatcttccccagcttgtgaggtgatgaggagaggttcaccagggaaagacgccgacttggtgtgcagggcttctgcgtggaaggagctctggtctgtggggtcaccagtccctactttaacctattcagacataaacggaggcaccattaaaacattaaagaatttatatgagcaaacagtgatgaaccagtgggacagccccagacatggtttgtcgtttgggggctaccagcgggtcttgaagaaaaggctttaaggtttgtgaagaggcaaagcaaactaaataattgattgggtacagttatgtagtcgtttcatttagagtgtccaggagaaaattttctggttatgtaatcagattaattggagatttatggttggttaagcctgaattttgttttctcctaaggtagtaacttacgagatacgcatttgagttagatcgttttgttgctgttacacaggaacctagatccctagagccacttcagtctacctgctatttaattattttaactttaatcagaagcactgtttttttcctacattttccaaatgtgtggcaagcagagtcttaaatctgttctgccagcctaacttggcttgcagtaaaatcttaaatttccagtttcttttttttttttttttttgtttgtgacggagtctcactctattggccaggctgcaacctccgtctcccaggctcaaggaattctcctgcctcagcctcccaagtagccgggattaccggcatgtgccaccacacccggctaatttttgtatttttagtagagacggggtttcaccgtgttagccaggctgctctccaactcctgacctcaggtgatccgcccgccttggcctcccaaagtgctgggattacaggcgtgagccactgcaccaggactgaaatttccagtttcttttcaacattcaccaaagccaactactcccatccaattcacaacattatcaactatttttgttttttattgtatgtttctatttgtaaatatttcaccggaggaaagcagaaaataatcccattacactccactgtcaaaaatttttctgctttttcttcttttatcttccctaggcacaaatgccttatcaggatatctttaaattcaagtttccctttggaaacttgatgggacagtgtgtcctcagccacactgcttttttttaagtcttgagttttagagctctcttgggataacccaagatacacacaacagccataccttttggaaggtttggtgaatatcagccccttggtcatctccttccagaggacacactgatgtatggaaatggagcttctcaggagagcagctgaatgtcctgaggctgagagaaatatcctggtttacccttcccataaaaagaacctttggggatcttaagattttctttccccagccccagttcttcctggtcagccaattggatggttgtatttaggggaaaagacaaaaataatgcctgtcttctgaattatctcatatttgtgaaggggggagaactgttttaaaagacaaaaaaaacaaacaaacaacaacaacaaaaaaaactcaccctaaggaggcatgcaagaacttgcaaagcaaaaaaaaaaaaaaaaaaaaacaccagggacacactgtagggcactgtgcagtgtcttctgggagggagagctttgagcactttagtgagtagggtaagggtggcagaatgtaccaacttataggattgcctgatttgacacttgagtcagatatgtgtctcttctggccgggcacggtggctcatgcctgtaatcccagcagctggggaggccaaggtgggtggatcatgaggccaggagatcgagaccatcctggcgaacgtggtgaaaccccatctctactaagaatacaaaaaaaagtagctgggcatggtggcacgtgcctgtagtcccagctacttgggaggctgaggcaggagaattgcttgaaccagggagtaggaggttgcagtgagctgagcttgcaccagtgcactccagcctgggccacaaagcgagactccatctcaagaataagggaagagaccagccctcatattgtcttatgcccaatttctgcctccaaagaaagaagaactaaaaactaaaaggcagaaatgaaatccacaggcagacagcccagtgccacaccctgagcctggtagttaaagattgacccctgacctaatcggttatgttatctatagattacagacattgtatggaaaagtactgtgaaaatccctgtcctgttctgttccattctaattactagtgcatgcagcccccagtcatgtaccccctgctttctcaattgatcacaaccctctcatgcggacccccttagagttgcaagcccttaagagggacaggaattgctcactcggggagctcagtttttggagacgtgaatctgccagtgctcccagctgaataaagcccttccttaacttggtgtctgagggatttttgtctgcagctagtcctgctacatttcttggttccctgactgggaatgaggtgattaatggatggatggttgatgcacctccttaggcagctgaggcttgccctgtggagcatccctgcgggggactctggccagcttgagcaacatggatcctgagagcgctcccagataggcatttgccctggtggaatgccttgttagagcggtgcacagcaggcccctgcggaggatcaacgcagtggctgaacaccaggaaggaactggcacttggagtccagacatctgaaacttggtaagactggtctttggaacttgcccactccatttgagtggaagcatggcctgatcacccacgacgtgcctgtaccggcactttggtttttgtttttgacttgacttggattgctcgatactttggttttggttttgacctggcttggatttcttgatactctgatttttgttttggttctgatttggtgtaaactgtgaaagtgtgtgtgtgccctttttacccgttctttgttttgtggtgtgcgtgtggtgtgagcgtggtgttttgtcttgaggaagcatgggtcaagcacaaagtaagcccaccccaccaggaactatgttgaaaatttcaagatttaagggagactatggagtactatgacaccaggaaaacttaaaactttgtgtaagatagactgaacagcattagaggtgggttggccaccagaaggaagcctggacaggtcccttgtttcaaaggtatggcacaaggtaacctgtaatccagggcacactgaccagttcctgtatatagacacttggttacagctggttttagactgccccccacagtggttgagagaacagcagcataagcggctggcagaggcaaggaaagaccagcagagagagagaggaagagacagacaaagagggagtcaagaagagagagagagagagacagaaagtgaaagagagaaagaaagagggaaatatacaagtagttaagaaaaaaaaagtgtaccctattcttttaaaagccagcgtaaatttaaaacctgtaattgataattggaggtcttttccgtgaccctacaacactccaatacaaccttgttgtaagtgtaagcaagggtgaagcccaaaagcactgaggccactgacaacctgtagccttcgtatcaaaaattcttaactgagtaatctgtggatggcccaaatgcattcaatctgtagcagcaactgctttgttaacagaagaaagtagaaaaataacttttagaggaaacctcattgtgagcacacctcaccagttcagaaatatcctaagggaaaaaaaaaaaaagatgatttaacattagccactgaaaattcccttaacctagcaggtttcctaacagggggtctaaatcttaattaccatacaaaggtctgaccagacctaggaggaactccctttaggatgggatgatagaaggaaaaaaaagaagccatctataccaattctaagttaatttggactaaacaaggtcttattaatagcaaaggataattgaaatccaaaacttacaaggttttcaacaaaagtaaagtttgctaaaagttaacagtgtaacatgtattatagtaacttctaatcttgtggccttagacagtctagtccacagacataaaggaagttcactttggaaaagaatggttatcatctttgggaaaaaaaggggaaagaaggtgagggagcagaatttatgtaaaaagaatgttatatggtaaattcttgtcctgaaataaattaactggttgtttaaagaaagaaatgtttgtaataagtcagaaagttgaggcctgtagaagaattgtctgtgaaagtcgtgaaagaaaaaaagttataaaaaaaaatttatgcaagaaatgttgtataatttaaaagtaactaggcctcctgaatgtaaaactattgaaaaaaacagtttatatgcaaggtgtataaacaaagtaaaatataactttggtaaaaggattataaggaggcataagaatgtaaatttttacctacattaaaaggttaaaaaaaattgttttgaaggtttaagcaagttttaaaacattaattttaaagaaaattctgtgtgtaaacatattagctaaagttaaaggggtatcatccagttgttctgtgaactggacgttaaagtaaaaacacaatgagtttttcttaaagcgctaacatgctcttttacaaagattataaaaggttaaaaacagtctataaaaatcttaccttggccgggcgcggtggctcacgcctgtaatcccagcactttgggaggccgaggcgggcggatcacgaggtcaggagatcgagaccatcccggctaaaacggtgaaaccccgtctctactaaaaatacaaaaaattagccgggcgtagttgcgggcgcctgtagtcccagctacttgggaggctgaggcaggagaatggcgtgaacccgggaggcggagcttgcagtgagccgagatcccgccactgcactccagcctgggcgacagagcgagactccgtctcaaaaaaaaaaaaaaaaaaaaaaaaatcttaccttatgatccaacattaaaaattgaataaatgtgtctataaagttttattaaaactaagtttaacattaatagcacactaatataaaggtgaaatttagcttatctggtataaaaatcatacaggaagcattgtcaaatataaaatggtatttggcttctttgatctaaaaactaataaaaaatacatgctaaaggaaatttctcagtagaaaggcaccaaggactacaaagtccactgctgatgtctccacatttaaaacaaaaggtcagtttcttagaaattatatacttggtttatcttccgctttcctttccatcaaaactaaaagtcttttagcacatgtaccacccctagaatttccagtaaaccagcaccagcctgaagatcacgttctcatcaaagggtgaaaagaaaggaaacttgagccagcctaggaaggaccctaccttgtgctgctaaccactgagactgctgttcatgcagcgaaaaaaggatggactcatcacaactgagtcaagaaagcgccaccccctccagagtcatgggccatagtccaagaggaaaaccctaccaaactaaagctaagaaaaatttaactctctcatctattctattactctttcttctttcctcgctctattgctgaccatctagttattaatgtagccaagtcaatttcacctcaaactattgcatttaatgcatgccttgttataccctgtggggacttgccaagtcaaagacttgtacttcagaaagctctgtacttcagaaaagtacctctgtccctcctgactctcctcagactgggcattagtaaattaggaccgtttaatccggggaaatttcgataaagcctccagtgtcaaccaggagccttgctccccaatgtagagcttttatgccatagttggtccaacattctgtggaccactaaagagcaaggatggactgccccaactggtttttgtaattccctaaaatcatacattaattttactagaggatcatagaagttaaagacttaaaacaaactttggcaaacaggatacgaagatgcaaattcctggttggaatggatcaaatattccatccacacgttaaacaaaagcaattgttatgcttgggcacatggcaggccagaggcccagattgtcccctttccactaaggtggtcctcctgtccaccaggcatgggctgcatggtagctcttttccaggattctacagcctggagtaataagttgtaccaagctctctctgtgatatcccaaagtccagcaccctgtgagtcagcccctgagggccatccagcttctgtctcccaacactaagttcacttcatgtctctcatgacagggaggaaacttagcattccttggagacctgaagggatgcagtgagcttaagaattttcaagagcttatcaatcagtcagcccttgttcatccctgagcagatgtgtggtggtattgtggtggacctttactgggcactgtgccgaataactggagtggcacttgtactttagtccaattggctatccctttcaccctggcatttcatcaaccagagggaggaaaaataagacatcgtaaagtaagagaagccccttatgggtctttcgactctcacgtctatttagacacaattggagtcccacggggaataccagatcaatttaaagcttgaaatcaaatagctgcaggatttgagtcaatattttggtgggtgacagttaataaaaatgtagattggataaactacatctattacaaccaacagcaacgagcttttcgtgagttaaaagaaaagctcatggcggccccagccctggggctacctgacctcacaatagttttacattcaggaggactaattacttttaaatttatacaacaatttcttgcataaattctttttttataattttttttttttttacacaatatgtgtcagaaaaaaaaatgatagttaatagttttaacccagactgtgggacactggccaaagctggtggcctatctctctaaacaattagacagggtttctaagtgttggccctcatgtttgagggccttggcagcaacagccctgctagcacaacaagcagataagctaactcttgggcaaaacctgaatataaaggcccccccatgctgtggtaaatttgatgaataccaaaggacatcattggctaacaaatgctagattaacaagtaccaaatcttgctatgtgaaaatccccccataaccattgaagtttgcaacaccctaaaccctgccaccttgctcccggtatcagagagcccagttaaaacataactgtcttaatccttttaaatggatcaaacccctcggaggatcattgttgtcactggcattattaatattggtatgtttatgttgtctacttttagtctgcacatgtctccaaggagtctgaggacaagtgcaaagtcaacaacaagcaatgatggtggtggtgatcctagtcaataaaaagggggaagatgtgggtggcaagccacccaggtgccaaagcaagagactgagggcacaagctattccagtataataaagaaaatatatagtataagaatagttctactagaaatagattatggatatgattatatatgaatgtcattaatcattagtttgtagcattattctttattctaatattataataatctttgttctacaattataacctaggaaaaaccaggccctacagagataggaggtgaagggacatggtgagaagtgaccagaagtcaagaatgttagccctctgttacgcccagacagggccactagtgggctccctggtctagcagtaatgccagcacccattacctagcagaccttggtctagcagtagcatcagtgcctagggaaggcacccattacttagcagaccaggaaagggagtctccctttccccgggggagttagagaagactctgctccaccacctcttgtggaaggcctgacatcagtcaggcccgcctgcagccatctggaggcctaaccgtctccctgtgatgctgtgcttcaatagtcacgctcctggtccactttcatgttccactctgtatacctggctctgccttctagatagcagtagcagaattagtgaaagtactaaaagtctttgaaatgcataaaagaaatagtggtgtaatctgtcctctctctctctccacctcggctgccaaacagggaagggccccctgtccagtggacacgtgactcgtgtgaccttacctatcattggagatggctcacactccttaccctgcccccttgtcttgtatccaacaaataacagcatggccaggcattcagggccactaccagtctccacaccttggtggtagtggtcctccgggcccagctgtcttttcttctatctctgtcttgtgtctttatttctatgatctctcatctccgcacatgaggagaaaaaacccacagaccctgtagggctgggccctacataactgtgtagaggtattagactcagtttattctagtgggcccaacctccgagaccatcttgagtatcaggagactgtgagctatacttggatgggagcagctttgccaacctctgcaaagtgactctgaaaaagatggcaagccctgctccagtcacacctggaagctgactggttcccgcatcaccaaagcatgaggaaattaatcacaggactcatttccctgaaaatttggacttgtacagtaaggacttcaactgaccttcctcagactgaggactgttcccaatatatacatcaagtcactgaggtaggacaaaagtttgctacagtcctattattttatggttattttaagtgtaccaggactctaaaaggaacttgtttgtataatgctattctatacaaggtatgtagcccacgaaatgaccagcctgatgtgtgctataacccatcttttttcctactgcccataaaaacaggcgaacttctaggtttcctggtctatgcttcccgagaaaagagaagcatagctataggcgactgaaaagatgacaagtggccccctgaaagaatcatacagtactatgggcctgccacttaggcacaagacagctcatggggataccgaatccccatttatatgctcaactgaatcatacgattacaagctgtcttagaaataatcactaataaaactggcagagcttcaactgttttagcccagcaagaaacccagatgagaaatgctatctataaatatagactagccctagactacttgctaacagctaaaggaggggtctgtgggaaatttaaccttactaattgctgtctacacatagatgaccaagggcaagtagttgaagacatagttagagacatgacaaaactggcacatgtgcctgcgcaagtgtggcatggatttaatcctggggccatgtttgaaaaatggttcccagcactaggaggatttaaaactcttatagtaggagttataatagtaataaaaacatgcttactgctcccttgtttgctatgtacttcttcaaatgataaaaagcttcatcgctaccttagttcaccaaaatgcttcagcacaagtgtactatatgaatcactatcgatctgtcttacaggaagacatgagtagtgaggataaaggtgagaacttccactaatgagagaggttctcaaacggggggaaaaagggaggagaccacccctcatattgtcttatgcctagtttctgcctccaaagaaagaagaagtgaaaactgaaaggcagaaatggaatccacaggcagatagcccagcatcatgccctgggcctgctagttaaaaatccacccctgacctaactgcttgtgttatctatagatttcagacattgtatggaaaagcatcatgaaaatccctatcctgttctgttctgttctgactagtggtacatgcagcccccagtcacataccctctgcttgctcaatcaatcatgaccttttcaggcggaccccgttatagttgtaagcccttgaaagggacaggaattgctcactcagggagctcagtttttggagatgtgagtcttccaatgctgccagctgaataaagccctttccttctgcaactcggtgtctgaggggttcttgtctgtgtctcatcctgctacaacagaggtgggcagatcacgaggtcaggagttccagaccagcctgaccaacatggtgaaaccccgtctctagtaaaaatacaaaaattagccaggcgtggtggtgcaagcctttaatcccagctactcagggggctgaggcaggagaatcacttgaacccgggaggcagaggttgtagtgagccaagattgcgccattgcactctagcctggtcgacagagcaagactccatctcaaaaaaattaaaaataggctgggttggtggctcatgcctgtaatcccagcactctgggaggctgaggtggatggatcacctgaggtcgggagttcgagactagcctgaccaacgtgaagaaaccctatctctactaaaaatacaaaattagccaggtgtggtggagcatgcctgtaatcccagctactcaggaggctgaggcaggagaatcgcttgaacccgggaggcagaggttgtggtgagccaagattgtgccattgcactccagcctgggcaacaagagtgaaactctatctcaaaaaataataataaataaaaataataaaaaataataatgaataagtaaataaaataaaaataagggataaatatgcaaggaaatagcataaagaaaaaacaatcagaacctcaggaaatattggacacacttataaaaatgcaaaatgctctggaaagtctcagcaatagaattgaacaagtagaagaaagaaattcagagatcaaagacaagatcttcaaattaacacaatccagcaaagacaaaaaaaaatgaacaaaaccttaaagaagcctgaataattggtttttctgaaaaagaagaaaaatctaaaagtttggaaaacatatttggggaaataattgaagaaaacttacctggttttgccagaggcctagacattcaaatacaaaaagcacaaagaatacctgagaaattcatcacaaaaagatcatcacctaatcacattgtcatcaggttatctaacgttaagatgaaggaaagaatcatatcatatatacatatatatatatacacatcatatatatatatcatcatatacacacacacacacacacacacacacacacacaatggaatactactcagccataaaaaggaatgaattaacatttgcagtgacctggataacattggagactattattctaagtgaagtcactcaggaatggaaaatcaaacattgaatgtcctcactgagatgtgggagctaagctatgaggacacaaaggcataagaatgatgcaatggactttggggatgttggggaaagagtaggagggggatgagggatagagactaccaatatggtgcagtgtatactgctctactgctcaggtgatgggtgcaacaaaatctcacaaatcaccactaaagaacatactaatgtaaccaaataccacctgtagcccagtaacttatggggaaaaaaaagagacttaaaaaaatatatatatatacaaaaattagccaggcatagtggtgcatgcctgtagtcccagctacttgggaggctgaggggagaatcactttaacctgggaggcggaggttgcattgagccaaaattgtgccattgcactccagcctgagccacagagtgagactctgtctcaaaaaatatatataaaaaataaaactagtaatccaggcaaaacaaaaatgaattatacattatgaaaatactctgccacatttttatactaaatcagccagtactgaaattttttagatgtgccatttgagtaaactgtgtgttccaagtcagattacctatgataacctctcagttatcagtgctatgaacctaaattgaagaaacaaacttgatatttaagaggacataaatttaatgttaagtgtgaactcatagagaacctagacagcagtgacttttttcattcctgagttcttaaagcttcctttatcaaaagcactgcattttatcactcgccacagaagagataaaaaatagtctaagttggcggggcacagtggctcatgcctgtaatcccagcactttcagaggccgaggtgggcagatcacctgaggtcaggagttcaagaccagcctgaccaacacggagaaactctgtctctactaaaaatacaaaattagctgggtgtggtggtgcactcctgtaatcccagctacttgggcggctgaggcaggagaatcacttgaacctgggaggcagaggttgcagcgagctgagatggtgccattgcagtccagcctgggcaataagagtgaaactccatctcaaaaaaatacataataataatctaagttaaatataaattaaatgtgtgtgtgtgtgtgtgtgtgtgtgtgtgtgtgtgtgtgtggtgactgtcctaactaccaaaataggttaggaccgtttttttcctctcaaacatataatcctgagaagacaatccaaacttcatgtacactttgggagaccaaggcgggtggatcacaaggtcaggagattgagaccatcctggcgaacacggtgaaaccccgtctcttctaaaaatacaaaaaaaaaaaaaaaaaattagccgggcatggtggcaggcacctgtagtcccagttactcgggaggctgaggcaggagaatggcatgaactcgggggatggagcttgcagtgagccgagatcgcgccactgcactccagcctgggtgacagagcgagactccatctcaaaaaaaaaaaaaaaaaaagcttcatgtacatttctgctacctgaggatctatttaaacatttgtaaagaaatcttattcaattgtcatgtttaatgcatattttcttgtagaataaaaattttctcatgggaaaagtctgatgttataacagtagcttaaaggataataaaaaatatgttttgctcaggagacatttctgaaaaaggctccaataatatacttatttcggccgggagcagtggctcatgcctgtaataccagcactttgggaggccaagaagggtggatcacgaggtcaggagttcaagaccagcctggccatgatggtgaaaccctgtctttactaaaaatacaaaaattagccaggcgtggtggtgggcgcctgtaatcccagctactcggtaggctgaggcagagaatcacttgaacccaggaggcaaaggctgcagtgagctgagatcgtgccactgcactccagcctgggtgacagagtacgactctgtctcaggaaaaaaaaaaaaaaaaatccgatttcactggagaagttataaactgttaaataagctattccagaaacaatagtattgagaaaatccaactaaattgacaggattgcttttgtaattgcagattgatgacaatcagattcactgagagtgaaaaactgttttgactattataaacttgtaattggatggcttatgtacctgataatagaacctcatgtgtgttctgttactgaagtttaatatgactaaatgcagcaaggctttaatgcgttatggcaaagcatattttcaccaggtaaacaaccttttatggtctattgactgaggacagaaaaaccctttatagtctagaacccagagattgagtctgcttgccatctacactgaagcaagacttcaggaccttgaaccttaggttgataatctcacaactgagaaggggccctccaaattcttgcaattgtatgcccattggagtttttttttttttttttttttttttggagacggagtcttgctctgttgcctaggctggagggcagtggtgccatctcagctcactgcaagctccgcctcctgggttcatgccattctcctgcctcagcctccctagtagctgggactacaggtgcccaccaccacgcccagctaattgttttgtatttttagtagagacggggtttcaccgtgttagccaggatggtctcaatctcctgacctggtgatcctcccacctaggcctcccaaagtgctgggattacaggcatgagccaccacaaccagccgcagatattaaggtaaagttaaacagggaagtttctcctaaaaagcaaaggcagctttgatgtagatcgctttcttcacaagatgaaaaatcaagacatctctactatcatgacactcttagattacggtttttttcttatggctctgcaaacaacagaaattaaaaagggcctcttgtgtgcactcatggggtacacttttatatgtagaagattttgcagccaacattatatatgaacaaacttatgccttcataagtaaaagatgaaggtccaatgaggatgagaaattttaatgggacatctgttgcctcataatatcagaaacagaatattggttcactgcagttaacctaattcataagttaaagagaacttattcagaatagattatagagtattgccaggaggccattactcttcaatggctatcatttgttaggtatttttgttccccatggtttagagtaaatgaggcaatggttagaaatttattccccctactagggctctatagcatattctattgtaaaggctatggttacacaatagactttaatttttctttttaaagttgtgcaaaataatagaatttctctagattacttactggatgaacagagaagtatctgtgcagttgctaaaacttgtagttgtacatagaaaaatatatcgggtattacagagattcagttgtaggagattaataaataggctgcttggttgaaatgaggagaccatttatttacctaattatttgatctatttaatgttagttggtgggctcatgagaccctggctaaaaagcatacttgaggccaggcatggtggatcacacctgtaatcctagcactttgggaggccgaggcgggcagatcacgaggtcaagagttcgagaccatcctggccaacatggtgaaaccccgtttctactaaaaatacaaaaattagctggacatggtggttcatgcctatagtctcagctactcgggaggccgaggcaggagaatcacttgaacctgggaggcgaggcagaggttacagtgagccgagctcacgccactgcactctagcctggcgaaagagcaagactccatctcaaaaaaaaaaaaaaagcatacttgaaactcttgttattatctttcttatagtcgaaatagtagtctccctactgcattgtattctctcaaaagttataaatgtttgtatgcagttatctctagaatgtcaaatgatctctctttaacagcaatcacaaaaactcaaatgcatatgtgaccatgaggacaccataacctatgaatgacctgataaggacaaaaactaaaggtaatggaaactgagagtggcattaagacaaagttttggtcacactcttacctatgtgagaacttaaccaaaaggggggaattttataaacaacattattgaaggccatcattctggattgagcttgtgcattacgcccaaagagaccaaaccaaatcaaatggagtcactcatgctaaatgtgacataatcaaactgaaaatgtaaggaaataggtagatcctaaaacaggccaggtttggttattcttttgaaaacagcagatttcaacacaaggaggtcacctgtactgtaacccttaaaaaaaaataataacctgaagtccttgtttccactttacaaaagctacagttctgctatttcacaatgggatttgagaataaataagtagatttttgatggtgacagaataatatcaatgtctaaagctttgttctagctctcaaaattgagaagatgatcaaaagggagaaattgttaaattaattatgcctaaagctgctcccttttctgtttaactttggtcactaggtttttttttaaacattgtaaactgaaacctaactggatatataaatagactgtaatccattattgtaccaaccactgtgtttttgccaataaaaggacatcaagtgttcaaattatgtttcaataaggcaaatcccaacctgtaatcaatctggctgtttctgtacctcacttctattttctgtatgtcactttgctttttccatccacaaacctgttttcataatgtggctttgccagagtctctctgagcctactctggatccacaggctgcccaatttgcaaatcattctatgctctattaaactctgttgaatttaatttctctaaaattttaaagtttttctcttttaaaagttttcaaatattttcttctctctctctctcttttttttttcttgagatggagtttcactcttgttggccaggctggagtgcagtggtgcgatcttggctcactgaaacctcagcctcccaggttcaagcgattctcctgcttcagcctcccacgtagctgggattacagacatgtgccatcacgcccggctaattttgtatttttagtggagacagggtttcctcatggtggtcaggctgatctcgaactcctgacctcaggtgatccacccacctcagcctcccaaagtgctgggattaggcatgagccaccgcacacagcctagttttcaaaaaaaatttttttttgagacagagtttcgcgctgtcacccaggctggagtgcagtggcatgatctcagctcactgcaagctctgccttccaggttcacgccattctcctgcctcagcctcccgagtagctgggactacaggcgcccgccaccatgcccagctaattttttgtatttttagtagagacggggtttcaccgtgttagccagatggtctcgatctcctgacctcgtgatccgcctgcctcagcctcccagtgttgggattacaggcgtgagccacagtgccagctcaaatattttcaatgataaaaataaataatgtgctgttgggctttgattttctaaactcatccctcagctatttcctcaaattattctgtcttcgaaatgcttctccaatatttttttttttttgagacagagtctcattttaccacccagtgtggatggcagtggtgcagccaatcatggcttactgcagccttgaccttccagactcaagcaatcctcctgcctctgccacctaagtattgggactataggcatgtaccaccatggttggctaattttttcatttttttaatggaaacaaaatcttattatgttgctcaggctgcactggaacgcctgagctcacataattctcccatcttagcctcccaaagtgctaggattacaggtctgagccaccgtgtttgcaaaatggtagcaatttttcatcccccttgtatccatgcccaatgccagatgcttttacagttgtttccatcaagattcagaatctgttttccaaaccctagatcaggctggccttatttgctcagggcagtagaaacctgtgaacatggcaatgagctagtttgggacctaggctcaaatggtcttgagtgcttctgtttttcttttagaatgttgacatcaccttggaaaaaagcccatgttagccagctggaaaataaggtatcatggggaggagaagcaaggtgtccctattgacaaccccagaagcagaacatcacccccagaagcacagctgcctagtcaacaagcagctgacgacatatgactgaaggagctcagctgaaaccagaagaatggccccactgagcccaacctaaatggctgaccatctcgattatgaactaataagttttggatgatttgttatgctgcaatagctaactaatacatgcacccagtgcagataggatgccaggattcaatgacaggttgattactagttatgttctaacagtgggcaccctataggtactgattttttcccctgatttaaagttgggtgacttgtaagagaatgttgagtaatgcagaaatacaggtagacatgtatgcatgtgattggtgcttatacccacacagtcccacacaccacaggagaaaacaggtaactacagcctgactagtagggccaaggccaatagcaaaataagttttgcctttaatctgttttctccatatctaaacatttgaggtcaagagtgtggacagatctgaagacacagagttttattatcctgtggccccaacattctttcttcactgtctgatctctggaagaaaagtgggcaacaggtggccagcagtggtctacctgtggttattttactcctgctgccatctgctctttttatggccactatctgttccacccttagaactgaagaaagatattggtagggagagactctgccttcacttctggcagaaaagggatgttcagttcattcacccccctgacatcagagctgaacttcaatgtggcagctattggccacgtgtgcctcctgagtgactggaatgtggctggtctgaactgcgatgtgctagaaaggtaaaatacagagttagtttcaaagatttagtttcaaatgtttatatacattattaataattacacattcctcacacattaaaatgataatattatggacatattgggttaaattgttacaatcaattcaacctgttccttgtttctttttcaagtttgtctactagaaaatttaagattcacatgtggctcacattttatttcagaagattaccatctttttaaaatctgaggctgcctcctttagccgggaaggtcataaaatctgaaattttaaaataattattgttacattcttttcatttttgaatagccactatatatatataaatataaatatatataaaaatatataaaaataaaaatataaatatatataaaaacataaatatatataaatataaatatgtataatatataaatatataaaaatatataaaaatataaatataaaaaatatatataaatataaatatataaatataaatataaatatatataaatatatacatataaatatataaatataaatatataaatatataaatataaatatatataaatatataaatatatatatataaatatataaatatataaatatatatatataaatatataaatatttatatataaatatatataaatatataaatatatataaatatataaatatatataaatatatataaatatataaatatatataagtatataaatataaatatatataaatatataaatatatatataaatatatataaatatataaatatatataattatataaatataaatatatataaatatatataaatgtatataaatacataaataaatatataaatatatataaatatatatataaataaatatatacaaatatatataaataaatatatataaatatatataaataaatatatataaatatatataaataaatatataaatatataaatatataaataaatacatatataaatatataaaatatatataaataaatatataaaaatatatataaataaatatatataaataaatatatatatatatatatatatatatattttagacagagttgtgctcttgttgcccaggctggagtgcaatggcacaatctcggctcaccgcaacctccgcctcccaggttcaagcggttctcctgcctcagcctcccgagtacctgggataacacacatgggccaccacaacccgctaattttatattttttataaagactgggtttctccatgttggtcaggctggtctctaactcccgacctcaggtcatctgcccgcttcagccttccaaaatgttgggattacgggcgtgagccaccgtgaccggccccatatattatttataaatgcatatgaccttacacacaaggttaaatgcaaataacctctggggtgggcctggctcagctcagggaggaagccctgtcagagaaggatgcagcccaagctgtcactcttctttcagccccgcatctcatcacatcttccgtcaatcatggcctgagggggcggggatttaaatgttatccaatcagagacgctaggcagggaaccgtccaatcaggcacgcaggtgaagcggacagggcggcttccgggtttggcggggcctttgtccctcgctgtggcctgagctccaggtctcgtcttcagcgctctgtgtcctctgctcctagaggtccaggctctgtggccctgtgacccgcaggtattgggagatctacagctaagacgccaggaacccctggaagcctagaaatggtgagagtgccgggtccgacatccccagagaggggaggggctggttgtaatgggtgggaagtggctgtggcgggactcaggcctcccggcagtcagctgcacaatctgcgccccgagttcttgcccagctgggcctcagtccccatcagccttaagatggcggctgcgctgacaggcgggccccagcacgtcccgtctcttccttgcgcagtgactgtgccctggcctggagccctctctgggcagctctgcatccgcagcgccgcgtctctcccagactgtgcagggaccacgggaggatcgtcacgggagaatcgtcacgggagaatcctgacttggggtgcgagttcatgaatgggaagaactttggtcctgggttcctagttcctcttttctcctattaaaaatgtacagaccgggaggggtggctcacgtctgtaatcccagtactttgggaggccgaggcgggcgcatcactaagtcaggagagttcaagaccagcctggccagcatagtgaaaccccgtctttactaaaaatacaaaaatttgccgggcatggtggtacacgcctgtagtcccagctacttgggagactgaggcaggagaatcacttgaacctgggaggtggagattgcagtgagccgagatagcgccactgcactacagcctgtgtaacagagcaagactccgtctcggaaaaaaaaaatgtacagaagtcaccacaaaaatattaaagaaattaatcaaagagtgattaaaaaactgttgagcacccagctgtggtttgtaatttgttgttcatggcggggcttgaaggaaagacttttataaggtgcatgatgaagaaagccaaattcagtaattggttaggtaccgttatgtagtttcttagtttgtacaataaaggtgaaaattttctggttgtgtaatcagaccttaattggcagtatacagttgattaagcctgaattttgtgtctttcaatgtagtaattttcaaaacgatgcgcctgagttagattttttttttttttttttttttttttttttgagatggagtctcgctcttgtcgcccaggctggagtgcagtggcacaatctcggctcactacaacttctgccgctgcctgtgttcaagcttctcctgcctcagccttttgagtagctggaattacaagcgcctgccaccctgcccagctaatttttgtacttttagtagagacggggtttcaccatgttggcctggctggcctcgaactcttgacctcaggtgatccgcctgccttggcctcccaaaatgctgggattacaggcgtgagctatcacgcccagccacgttagatctttttaaaagtaggaacccagggtctagagacacctcagtctaattgcctgccactcaattattttcacactccacggggaactgattttctgctgcatttttcacctgtgtcccaagcagggtcttaagtctaacccccgtcccccatttctccagcctcactctggcttgcagtaagatactaaatttccagttctttctggcgttcccaaatgccaacttttcctacctaattcacattatcacctatttgtcctttagtgtacattttttacaccgtattttaattagttattttctgacaaagtattaaatggtgcttttaataagatttgttatctgtttgtaaatatttcccatgtgaagaaagcaaagaataatcccctgacactgtgttgtaaaaactctctgtgcttcttctccttgtatcttctctgggcacagagatcttgtctcaggatgtttttgggtcagggttttcctttggaaactttatggggtgttgtgtcctcagtcacccttcagtttttttctggtcctgggtttcagtattgtctggggataaaccaagatatccgccatggttatgtcagttagagtgtctagtggatatcagcttctgggttattttctcccataggagaacctgaagtctggagtgtatcctctcaaggaagcaagtggatgccctggggctgacaggaatcttctggtgtactctttttatgaaaaggtaaccccttgagatgttaaaattgtcttcacccaacccagctttcatttcttggagacacattgctggtcaaccaatcagactgtggcattgaggggaaaacaaataatttttgcctctggattgtctaagggggcagaaaaatagtgaaataactatagtgaaagtaaaatagtggaaaaaagtggaacatttgtgacagaaaaaatagtatcccaaaagacaaaaagaaaaagaaaaacactgaccccagtgagatggcgtaagaacttgcaaagttaaatgcccgtgggacagtcactggggcatagtgtggtatctcctgagtgggtggttcttgagcacataagtgagcaggagtgggtggaagactgtttgaagtgattgaatggcctgacttgaaacatgagtcagacacatctgttttttcatcagcactgccactccctgggtttgtcaccttgaaaagatttgttcatttattttaacctcagttttttagctgtaaattctattagtagggcttgaaaggtaggaaaatatttaccaaaggcataaaagtggtgggtttaagaaaaaaaatagtatctaataatatattccattcattaaaaattctctattccctttttacccccagggtgagtttaggaattttctcaggtgtgttttttatggctgggtgatttcaaacagaattctaaggctcagcttttagaatgctaccaaggaaatgagtagggaaaatctctgttccatttttttgtagaaaataaatacatttctacaagaaaatgtggtagataattggtgagttacatacattcatgaaaacatgagtttctctctctgcagggtaaatttgtgacagtaaacatctctgttcaaatcctgttatcttgatttctgagtttcatgctaaattttatgagatgaaacttggtaccacctagaagttttcccatatgactaactgtttactaaatgattcttaatggaattcataaaataatgcatacattatgtgaaagaaatagatattttgctttttttattgaggtataaattgcaaacaccttaaaatttccttcccttgtatgaacactgtgactaattttgctagatttttcaaacacatagtttcaaaaaccaagtgagtaactctaacatagaaattaaagcttgagcccagtgactcagagctaaggctaatattgagcctgcaaaaggagtttattacaggcccagttagttttttttctggggagcctcccctgcagatgtcctagcctgctcactctagctgtggaagaagcttttctgctgagagaagctacagagtcctggaaaggtggggacccacaggcagatgcagttaaggttaagatggtaggagattgagagggtcttactgatgataaagttgttaatgtttgaaggcagtttctagactttgtaatacctaacaaagttagatttatgttaaaaatttgaattccaaaggactattgcaacaggaggaaataccaactgtaagaaccttaaggattgcaaagtttaggcagaaaagggctttctttcatggggaggagcaaacaaaattagaagttggagacggccggatgctgtggctcacacctgtaatctcagcactttgggaggccgaggcaggcggatcatgaggtcaggagatggagaccatcctggctaacatggtgaaaccccgtctctactaaaaatacaaaaaaatcagccgggcgtggtcacgggcgcctgtagtcccagctactcgggaggctgaggcaggagaatggcgtaaacccaggaggtggagctggcagtgagcctagatcgcgccactgcactccagcctgggtgacagggccagattccatcttaaaaaaaaaaaaaagaagttggaggtgactgacaaatgaagggtgaaataatcagattttagatcagagaatgttttaccctgaagtcagcatgttcttaggagggacataaaatggagttgtatattggctcagattgagggtagctccaagttcaggagcctgtgaaaaattttatttagaccactgaagacaaattcagctgatttttttaaatgagaaaaagaaaatgtgcagagttcttatcggaaaggggtcacaatccacaccccaagagagggttcttggatttcgctcaagaaagaattcagggtgagtctacagagtaaagtaaaagcaagtttattaggaaacagaaggaataaaagaatggcttactctataggcagagcagccctgagggctgctggttgcccatttttatggttatttcttgattatatgctaaacaaggggtggattatttttgcctcccaattagacaatataaagtcattttctgatgtttccatgatgtctccatggcattttgtaaactgtcatggcactggtgggagtgtagcagtgaggaccaccaaaggtcactctcatcccatcttggttttggtgagttttatccaccttctttactgcaacctgttttatcacccagatctttataacctgtatcttgtgctgaactcttgtctcatcctgtgacttagaatgcctaaccatctgggagtgcagccccataggtctcagcctcattttacccagcccctattcgaaatggatttgccctgattcaatacacctctgacatttctccttttttttttatctgagacggagtctcactctgttgcccaggctggagtgcaacggcatcatctcggctcactgcaacctccacctaccaggttcaagtatttctcctgcctcagcctccccagtagctgggattacaggcgcctaccaccatgcctggctaatttttgtacttttttttttttttttttcagtccaatcagtttactctgctttctccatctcctcctcccattagtcagccattggaactgggaaacctcctactttccccctctttgtactctttccacaattcatcttgtctttctgcagccatatcttcttaatacagactgaagtttctgtcattgagaacagagtgatccataaacctggtcatcacactttttatgagatagtaatgtgggccccagatccatggcatggtttcctctggatgcactcctggatctaatttttgtatttttagtagagacggggtttcaccatgttgaccaggatggtctccgtctcttgacctcatgatccacctgcctcggcctcccaaagtgctgggattacaggcatgagccatcatgcctggccgtaatctctgacttttttttttttttcttgagacggagtctcactgtgttgccccggctggagttcagtggcacgatctcagctcactgcaacctccgcctcccaggttcaagttattctcctgtctcagccttctgagtagctgggattataggcgcacgccaccacgcctggccagtttttgtatttttagtagagatggagtttcaccatgttgatcaggctggtctcaaactcctgaccttgtgatctgcctgccccagcctcccaaagtgctggggttacaggcgtgagccaccgtgcccggccaatctctgacttctttaagcagtgttttgtgattcttgtcatagggatctttcaccattctgattagctgtattcctagatattctattctttttgtggcaattgtgaatgggattatgtttttgatttggcttttggcttggatgttttgatgtacagagattctactgatttttgtacgtgtattttgtatcctgaaactttgctaaagttgtttattagtttaaagagctttcctgctgagactatagggttttgaagatatagaatcatgtcatctgcacacagggatagttagacttcctttcttcctgtttggatgccttttttcttttcttttctttttttttttttttttttttttgagacagagtcttgctctcgccaggctggagtgcagtggtgtgatctcggctcactgcaacctccgcctcccaggttgaagcgattctcctgcctcagcctcctgagtagctgggactacaggcacatgccaccatgccaagctaagttttgtatttttaggagagacggggtttcaccatgttggccaggatggtctcgatctcttgacctcgtgatctgctcacctcagcctcccaaagtgctgggattacaggcgtgagcccccatgcccggcagatgccttttattttcatctcttctctgattgctctggccaggatttccaattttatgttgaataggatgtttgagagaaggcatccttatcttgtgccagttttcaaggaggaatgcttccagcttgtgtccattcagtgtgttggctgtaagtttgtcgttgatgtctcattgttttgaagtatataccttcaatgcctagtttgttaagggttttaaacatgaaaaatgttaaattatattgaaagtatttttagcatctattgagataatcttggtatttgttattagttctctttatgtgatgaataacatttattgattgtatatggaaccaacttgcctcccagagatgcagcctacttgattatagtggattagctttttgatgttcttctgaattcagtttcccagtattttgttgatggtattttcatcaatgttcatcaaggatattggcttgaagttttcttttttttttaatctctgccaggttttgatatcagaatgatgctattcttatatataatgagttgaaaaggagtcctttcttttcaatattttgaagtatttttagtagaagtggtactagctcttttttgtacatctggtagagttcagctaggaatttgtctggttctttgcttttttttggctagtaggctatttcttactaattcaattttggagcttgttattggtctattcagggattcagtttcttatttgttcagtctctggaaaatgtgtctttgctcccaggttactattctcaagcttggcccaaataaactcttatattcatgttgcctcagctttttccttttaggtagtcatatcacgtagaatgagctagagcagcctctatgaggggatctctcctttgattgtactccacttgctgtaacacccaagaatgcagagtgtggttgatcctacctagaatctgcacataaggtctggcctcttcctgggatttacaggacacggccagactttaggttgagaatgtacagaaaaccaacaggaggcattttctccattgtgagttgtcaacatagacatcttaaagccccctttgacagtgtggttctttaagcttttcagatcttgttcagtgatttgccacagttatgtgagaggctccagatataaatagaatctgatgacagaatcagcattttaagagtgagatatcaaagtcataatgtatccatagccatgaccacaactatacctacctgtaaaatgtgatactggagtagagtattcttgtctttctccttacccaaaagctagcaaattgggacaagtgattaggttctggagctccaccaggccattttctatttagaatcagcctgaatctctccagcctggattatcattgggccatcagcccagggtcactaagaaccctctcacaatcacctagacgtctttgagacatttgaggatgtccagggcagaattgtgtcaggctgacaagagtggttaattctgcttctggcttggtgtaagagaaatgagtcattctgtgtgtgtgtggtttttttagggttttttttctttttttagacggagtattgctctatcgcccaggctggagtgcagtggcgcgatctcggctcactgcaacctccgcctcccgggttcaagtgactcttctgcctcagcctcccaaatagctgggaatacaggcacttgccaccatgcctggctaatttttgcatttttaataaagacagggtttcaccatattgcacaggctggtcttgaactcctgaccttgtgatccgcccacctcagcctcccaaaatgctgggatcacaggtgtgagccaccatgcctggcaattctgtgtttttttctccccttatacaagagataactttggttggtacccagatgagagtttctcaagtttcctgatacttggatgaaagcaataggaggtctggtgactcaaacagataaagtaattgttttcattttatatggccattcaaaaaacagatgaagcagtcatgatccttactatccaggaacatgtctagactaacaactggatacatgggtgaattaagcattatatggttggtacaatgaatagatgtgtccaaaaaaaattggggccactgttttatattgttacttctgataccatcagctgaggagatatttatggagtgaagatttgttattatttgtgtttcctttactttgctaagaatatatatttatcttctagtataattattctaaagaactttaataaatttgtttaaattgcttattagtatatgttataaaattgacagggcagtggcaaaaatagattaaagttacataagctctgggatttaagattctcttatgtaagcttaggaaaaacagaactggaaataccttggtggcagagagaacataattctacatagggtcctttccctgcccaaattctgttcagattcacgttttttggaggccttatttatgtctggccccgctctggagccttacctcacaaaactgatttataaaaatcagagttttggctgggtgtggtggctcacacctgtaatcccaacactttgggaggccgaggcagacagatcatgaggtcgagagtttgagaccagcctgactaacatggtgaaaccccgtctctactaaaaatacaaaaattagccgggcgtggtggcacatgcctgtaatcccagctgctcaggaggctggggcaggagaatcgcttgaacccgggaggcggaggttgcattgagccaagattgtgccactgcactccagcctggtgacagagcgagactccatctaaaaaaaaaaagactggagttttgtctggtgagtcctgctgcttttctagagctggtgctcacaattttctgaaacccaaaaacagataaatgacagaaataaactatttattttaggatcttattttttgaatttgtattaaaaccagtgcttacagaaacattccatttagcaccttgttttctgtttctgccaatctagcagttgctccacaagccacaaacaagtaaatgtatacacaataaaaatttctctaaactacattaaactttttctatgttcttctcatctgcctgtatttaacttttattctatacctttaaaacaaaatcaatgacagagaaacagagggagaaataaaaatgctgaaccctttatctaagtcctgggaattattgaacacttagtatcaacttccagggtgttattaggattaaatcacaaaatgtgttattcccagcacagtgctctgtaacatatccttgagcacatagtacctgcttaataaacattgcatttgtatatgtgtacatgttattttccaaaggcagatttattcagacattgccgccttctgtttgttctgtaaactttaaagagccagcgaagaatataaaaatttaagatggagattggttttatttgtaccagaagtatttgtgttgtgacaagagtgctaagtgtaagggactctgtgctgtacctgcttctctaactaatgctaatgagcccagggggaacaacatcagcattgacagggaacttgtttgaaacacgcattcatgaacccttttcaaacttgcagatccacattacgtagagtggggccaaaattaccaaacgagttttaagctcattaaagtttgagaggcagtgcttagctaagtggttatcagccccgtcttgttttttttgttttgttttgttttctgtttttgagacaggatctcactctgtcacccagtctggagtgcaatggcataatctcggctcagtgaaacctccgcctcctgggttcaagccattcttatgcctcagcctcctgagtagctgggattacaggcacccgccaccattcctggctaattttttgtgtttttagtagagatgaggttacaccatgttggccaggctgatcttgaactcctgacctcaggtcatccatgtgcctcggcctcctaaagtgccaggattacaagtgtgagccaccgcgcccggcctctgcccagtcttctaattaggattacatggcagaaatctctgtacttatgccctttccatggatttcgtttattgttctgggtggaagcatccatgttgttttaatgaagtgcctcatgtgactctaaggtgaggccagaatcaagtatgagggcttcaatatacattcatgagagctaagtgccacctttgcactaaagggtggtctcagggcccgttctgtttgggtttggtagggacaggggagtgtggctcatatttccattactgtagcagaaattgctggtgtctgtggcagaggagggcacctaaggacaggaaaagagaaacatacttttatattcatagagcagctcgttgttcctgaatcctttctgttataaaggacagagaaatgggtggactttttctgcaggaccttccttctgtttgtgtgcgtgatggtagcagacaaaaaggtggtgctgacatttttaaaggaacgttctcaaaatgcaggtataacttgtccagagaatgttatctaaaaaggattttcagagaaagaaagagaaaaaatggctttttttcagctaaacgtgtctcagaagaagagctgtgtgcactctgcttcatggaatgccatgtgtttagtacttgcaaatctttacttctcgatttgtgtttttccttcttaaggagtttgttttaactacattaaaaaattcttataatattcaaggctgtctgcaaaacatttctttactatataccagagctttctctacattctctacatcatggcttcttatatgccacgcagaattcctaccataaatttataatcggcactactaaaaatgttccctttgtggctgttaaacatggggagatgtagatactcaagattcctattgggggaaagctggggtccctagtaaagatggagaatatgtaatgttgaggtttcatctgttttctctattaactctatgcagaacaggattaagaaaatgcttatttaaacagaataccatttattacccagaaagttctgaaaaaaattattaggagatacctgctctctagggtgctaaagaaagactacttaaaatcactgttaaaaataacagaacatgggagatatctgtattttgaactttgtataaaactgatgtatctttatggttgcattcagattataatttactgtttgaggggcaatatcttagcagtgatgccgtgttcttctatgtgcatcagcacatcataaaaatttgttggctgggtgtggtggctcacacctgtaatcccagcactttgggagggcgaggtgggcggatcacctgaggtcaggagttcgagaccagactgaccaacatggagaaaccccgtctttactaaaaatacaaaattagctgggcatggtggtacatgcctgtaatcccagccacttgggaggttgaggcaggagaattgcttgaacccaggaggcggaggttgcagtgagccgagatggtgtcattgcactccagcctgggcaacaacagcaaaactccatctcaaagaaaaaaaaaagaagaaagaaatttagaagttcagactttactccagatcttctgaagaaaaaaagtctgcacaacagaatctccagtttattgttcacctttaaagttgagaggtaccttcgaactcaacatgtcttttttgtctgaaaaatatacacaactcaaactttatgatgtaaatatagcactcgaagtgtacaaatttttgtttatgcccttaattttatgcttctcatccagagaagtatcatatatatactggtgttatggatcttatgccattctcttctctcagagttagagaaaacattagataatatttctgtgtgaaaaattattggggccgggcatggtggctcatgcctgtaatcccagcattttgggaggccaaggcgggtggctcacctgaggttgagagttcgtgaccagcctgaccaacatggagaaaccccgtctctactaaaaatacaaaattagccgaatgtagtggtgcatgcctgtaatcccagctactcaggaggctgaggcaggagaatcgcttgacgccgggatgcagaggttgcctctgtctcaaaaaaaaaaaaaattattggataatttcagtcattcctgcaaatcagaaccaattctctttattctgtcatttcactttaattcaaataataaattctgcccgtggccacttggtaaatatacgtgtgtcttgtgtgcttgtgtttttcaggggccattgacatttagggatgtggccatagaattttctctggaggagtggcaatgcctggacactgctcagcaggatttgtatagaaaagtgatgttagagaactacagaaacctggtcttcttgggtgagaataactttagtacacaattactagtataccctaaaggtttcatttctcattttttgagaataatttttggtaatttatgctttgcataaatgagtttctgatacttgttcttaagaaaaccttgaggatttttccatataggaaagaattttttcaagaagttttatcttgacttaaactttccacattcctgggctgatctgtatccttcactctagattagtggcaattccagaaatttagtggcataaaatattgttgcccatatcttaaaatctatttgccgccaccaatttttgattaatgaatgccaggcagtgaaattaagaacctacaaatgtaaaatattttctaaatacttagaaatttctgttataaattagtatttttaggattaattttctagaatattctaccacatcctctttactaagcacagtactaggttggtaactgaagaatatgagaaagattcatgttatttattttcaataaagcaggtattgctgtttctaagccagacctgatcacctgtctagagcaaggaaaagagccctggaatatgaagagacatgcgatggtagatcaacccccaggtaggtgagagtgaacacaacagacgacatgaatgagaggtccaaaaaagaagaaagccaatgcttaaaatgttatttgagaatctgtgttccaaagcaaatattttctgggaagcctgagtttttttttttaattttgccctcgcatagggtcatcttctgtcttatgcttttaaattcaaggattctttccccttggtgatctcccttcaagtttgctatcagaaccaaagtcctcttcatggcatgcgagactcacaatctgactgcttttccattgttttgggggacacacaaatatctacatgattttgagaaactctatgttaaactattttcttttcttttttctttctttttttttttttttgagactgagtttcatgctcgttgcccaggctaaagtgcaatggcacgatctaggctcactgcaacctctgcctcctggattcaagcaattctcctgcctcagcctcctgagtaggtggaattacaggcacctgccaccatgcccagttaattttttgtatttttagtagagacagggtttcaccatgttgggcaggctggtctcaaactcctgacctcaagtgatccacccgccttggcctcccaaagtactaggattacaggtgtgagccactgcacctggccaaactattttcttagttctctttttgcatcatgtctgaaatgtgtaatagtagtggtttctgttccactgttttttgttgttgttgttaacttttctgcacactccattctgttcttattactatattctcgaaatatagtttgaaattataaagcatcatgtctttctactttgttctttttcctcacgattgctttggctatttgaagtttattgttgtttcttgtaaattttagaattgtattttccattactgtgaagaaaaatgccactgaaattttgatagggaatttattgaatctatagattacttagataataggacactttaacaatatttattttttcaatctgtagacatgcaatatttttaaatttgtgtcttctctaatttcttttattaataacatatctttcgttgtaaagattttttacttccttgttctcagaaatttatcattttaatgctattttaaattgttttctttctctgttaaagtgtatggaacaataacttcatacttgtgtgttaattttatgttttgctaatttactgagtgtattaattcagacaaatttcaatgtagtgttcatggttttttatatataaaatcatatgatccacaaacagcaactttttacttgtgttcaatttcagtggctttttaaaaatgtttttgactcattattctgccacatacttccagtgctatgttaaaatagaagcattgacaatgggcacaatgtagttttgcattagtgtctgtgaatttgaaggagcaaacaactcctcaagcttctataaactggtttcagtaggtaaagatctttttctgtcatgtctccagggtcatagaatgctctctgggtttgtagtggagagggggtgtagcttggtcacaaggctgctgggtctgcactagggtccacctttagttggcttgttacaggggcttgggtagtggtaattcccattttatttttggacagactgaatatccttcaacactttgatctgtagagcagacaatagggcaggtttctgcagtcaggttcatatataatggtccttatatcaggatgtgaatgagtatggcgtttattgagtaccggagaggattactgtagttatgcagacaaattcttttttaatggtatatcagtgttgcacagcagattttatgagtaaatatgtcacttactattactgcgcagtttcatatcagtgttttgttagtgtaggtttcttaacattgagttattgtgtttttttgtttcacttttgtattataattttagacagtttgcaattcggtttatctcttataattaagagataaatcagccatatgtctgtcacaattagatatatatgtgtgtgtgtgtttatctataaatatgaccccaatattggttatggcttatcttgtatatattctttcttagccaattttcagtggttgttttatctcacctaagtgagtagtcatggaaatattttcaccatctcttattttcaccatgtgtttaatgatgatgtttctctcacctttgtgtgagagaaacacttttgtaatttgaaggtaatttttgaaaagatttataaatctgtatttttttcagtttttcctttagaaaaattaattgttgtaaaaacacataatatttaccatcttaaatctatttaggtgtaccttttagggccagacatggtggtggctcacatctgtaatccaggattatttgagctcaaaagtttgagaccaacctgggaaacatatggagagtccctctctacaaaatgttttttaaaaatagccaggcatagtgttgtgcatctgtggttcaggctacttgcaagactgaggtgggagggttacttgagcctcagagtttgaggccgaagtgagccataattgtaccactgcactccagctttttgacagagtgagactgtgtctccaaaaaaaaaaaaaaaaaccacagctctacatttcaggcaggcatgttaattatattcacattgttatgcaaaagacttagatattttacattttgtgaaactaaaactcaatacccattaaataacagcaacccattttaccctctttccagcccttgacaaacacccttccactttctgtttttatgagtgtgactaattaaaatatcccatatcagtggaatcatactgtatccatcatttcgttactggcttatttcaggtgacataatattctcaaagtttatcttaaaatgtgacaagattttcttttttttttttttttttatttttgagacggagtctcctgtcacccaggctggagtgcaatgacgcaatctcggctcactgcaacctctgcctccctggttcaagcgattctcctgcctcagcctcccgagtagctgggactacaggcatgtgccaccatgcccagctaatttttttcttatttttagtagagagagggtttaaccatgttggtcaggctggtctcaaactcctgacctcaggtgatctgccatcctcggcctcccaaagtgctgggattacaggtgtgagtcacacgcttggcaagattttgttttttaagactgaataatatttcgctctacacatatgttacatttttgatatgcttataaatcaagagacacctgggttgctgcagccttttagcttttgtgaatactagtacaataaacatggatgttcaaatatgtcttccaggtcatgtgttgcatattttaaattgataaagaggattgctgtatttgatgataattccatttttaattacttgagaaacatttataacatttaaaaataatgactgcatctttgttttctaccaacaattgacataggttttattttcattgcatcatcaacagatttggtgtttttaaataatttatagtggccattgtaatgggtatgacatgatttcatttttcattgttatttttatgtgtttctctacaaattattaattttgcatgtcatttcaaatgctttttccatttgtgtatcttttatgataaaaatttagttcaattgttaattttcaaatcaagttatttaacttagttttaagggttttttatatattctgaatattaactgtgacatgtaatttggaaatattcttacccattttctcggaggcattttcactgagttaaatgttttgttttaatgtgcagaaattttgaagtatagcatagttaattttttgttgttgttcctcaggcatttagtgtcttatctaagaaaatggtgccaagaccaatgtcatgtcttctttctatttttttctaagagacttattagtttttttatgtctaagtattttacttaaaatatttttgtatatgattcaaagaaatgatccaaccttattttatcagtattgatatttagtttttaacattgttttttaaaagactattgtttcctcttggcagctttgtagatcatttgattatatataaaaggtttcatttctgggctccatattttgttctttcatctgttcatctgcctttgtgtcaatattacactgtttttgttactgtagcttctaattttttattattatttttgagatggagtctggctctgtcgcccaggctggagtgcagtggctcgatctcagctcactgcaacctcctcctcctgggtttcagcgattattctgcctcagtcccccaagtagctgaggttacaggcgtgcactaccacgcctggctaatttttgtatttttagtagagacgggggtttcacaatgttgaccaggctggtctcaaactcctgagctcaggtgatcccccaccctggcctcacaaagtgctggcattacaggcgtgagccactgcaccctgcctaatatgtttaaaaatcaggaagtataatgcctgtttattctttttcatgggtgtttggctatagttcataatgaaatttaaaaattttaaacaatatttgtgtaataaaactgtgctattgtcatttttatagaggttatattgaatttgttcaccactgtaggttgtattgacaacttaactaaattaaactttttgaacctttagctgaagagtgtgtttgattgactgattgattcgagacagagtctctctctgtcatccaggctggagtgcaatggcatggtctcggctcacttcaacctccgcctcccgggttcaaggaattctcctgcctcagcctcctgagtagctgggattacaggtgcccaccaccatgcctggctaacttttgtatttttagtagagacggggcttcacatgttggccaggctggtctcaaactcctgacctcaagtgattcgcccacaccagcctcctgaagtgctgggattacgggcatgagccaccatgcttggccttatttttattttatttatttttatttttagagacagggtcttcctatgttgcccatgctagtttggaactcctggactcaagcaattttcttgccttggcctctgaaagtgctagtattatagccgtgagccactacactcggcccatgtgtttttttttttcaaatatattattggatttaacagttttacttttgctatttatttatttatttatttatttatttattttactgagacagagtctcactctgttgcccaggctggggtgcaatggtgtgatcttggctcactgcaaactccgcctcacaggttcaagcaatactcccgcctcagcctcccaagtagctgggattacaggcacccaccattatgcccggctaatttttgtatttttgtagagacaggttttcactatgttggccaggttggtcttgaactcctaaccccaggtgatccacccaccttggcctcccaaagtgctggcattacaggtgtgagccaccgcacccggcctacttttgcttttaatttttagtttcattcagttttggtcagaaaacacacagtgtatgattttggttttcttatatttatttgttgttgttttgaaacaggatcatactccgtcacccaggctggagtatagtggcataattttggctcactgcaacctcagtctccttgactcaggtgatcttttcttcctcctaagtagctgagactacagacatgcactaccgtgcctcgctaattttttgatttttttgtagtgacagagtctcactatattattcagtctggtatcaaacttctggtcccaagtgatcctcccaccttcatcttccaaattgttgggattagatgtatcagccactactcccaggtggtattctttaataagacttgttatgtgtcctaacagaatatatcacatccaaataaaaatattgtgtattctcttgcttttaactggaaagttttgtacatgctgttaagcctatttggtctgtggtacagtttggatgtccatgttctgcaaggctcatgctgcaatgtaatacacaatgttggatgtggaacctggtaggaggtgtttgggtcatggggactaattctcataaatgccatggcaccattcttttagtaatcagaaagttttcactacattaattcaaatgagagctggttcattaaaataacctgtctccttcacctcacacttgctctgtctcttaccatgtgatatgtccagctactctgccttccactaagattataagtttcctgagaccctcaccagaagcagatactggcacacacttcttatacagtctgccaaactgtaaaccaaataaacctttttactttataatttatccactctcagttatttgtctatatgcaaaatagttaatacagtctataatgttgtctgttttcttactgatcttttatctaaattttctatttattattgcaaatgggatcttgatgtctacaattattgtgttgctgtatatttcttgctttacctttgccaaaatatgctttatatatattggagtcctgatgttatatatacatatacatataaacataaatagatagatatgatagttatagattcttgacccatttggccattatataatatcagtgtttgtctcatgttagtacttgacttaaagcatattatattcaatataattactgccacctcacccaattatggttactatttgcatgtaatatagattcttttcattctattactttcagcctatttgactcaatgctaaaatgagtctgttatagacagcgtattgtatgcttttttacttaaactactcaggcatcttatttctttttctttttataaatttatctatttttgagatagagtctcattctgtcaaccaagctggtttgcagtggcatgattacagctcgctgcagcctcaacctcccaaactcagatgatctcatctcagcttccaagtagctgggctgcaaatgtgtgtcgtcacgcccagctcattttattgtttttgtttttgtttttgtagggacagaattttgccatgttctccagtctggtctcagactcctgagttaaagtaatcagcccctctgggcctcccaaagtcctgagattacttttttttattaagtagtttaattaatttatatttaaaatgattgcttaaagaaataaagttactattaccagtttcattgttattgttttgtttaaatattattttttgtgtgttctgggatacatgtacaggatttacaagtttgttacataggtaaacatgtcccatggtggtttactgcacctatcaattcatcacttaggtgtgaagccctgcatgcattagctgtttatcttgatgctgtttcccctactctgacaggttccagtgtgtgttgttcccctctatgtgtccatgtttgtttttgtttttgttgttgttgagacagagtcttgctctgtcgccaggctggagtgctgtggcatgatctcagctcactgcaaactctgataccctggttcaagcgattctcctgcctcagcctcccaagtagctgggattacaggcatgcaccaccattctcagctaatttttgaatttttagtagagatggggtttcgccacactggccaggatggtcttgatctcctgacctcgtgatctgcccacctcagcctcccaaagtgctgaaattgcaggcatgagccaccgtgcccagcccatgtgttcttattgttcggctctcacttacgagtgagaacatgtggtgtttggttttgtgttcctgcattagtttgctgaggataatggctttcagctttatccatgcctttgcaaactacatgctcttattcttttttatggttgcatagtattccatagtgtatatgtaccacattttctttatccagtctattattgatgggcatgtgggttgattccatgtctttgctattgtaaatagtgctgcaatgaacatacacatccacatatctttataacagaattatttatattcctttgggtatatacccagtaatggggttgctgggtcaaatggtatttctgtttctaggtccttgaggaattcccatagtgtcttccacaatgattgaactaatttacattctcaccgacagtgtaaaagtatttctatttctccacagcctcatcagcatctgttgtttcttgactttttaataatcacgattcttggccgggcacggtggctcacacctgtaatcccagcactttgggggtgccgaggcaggaggatcacaaggtcaggaaattgacaccatcctggctaacacggtgaaaccccgtccctgctaaaaatataaaaaattagctgggcgtggtggcggacgcctgtggtccccgctacttgggaggctgaggtaggagaatggcgtgaacctgggaggcagagcttgcagtgagccgagatcgcgccactgcactctagcctgggcaaagagtgagactccatctaaaaaaaaaaaaaaatttagaaaaaaataaccactattcttactggcataagatggtatgtaattctggttttgatttgcatttctctaacgatccctgatgttgagctttgtttgtttcttggccacataaatttattcttttgagaagtgtccatgttctttgcccactttttaatggggttgttttattcttgtaaatttgcttaagttccttttagactctggatattaacgtttgtcagatgaataggttgcaaaaatgttctccgattcttaggttgtctgttcactctgatgatagtttttttgttgttgtgcggaaggtttttagtttaattagattctatttgtcaagttttgcttttgttgcagttgcttttgacgttttcatgatgaaatctttgtccatgcctatgtcctgaatggtattgcctagattttcttctaacgtttttatagtttttggtttcatatttaagtctttaatccatcttgagttaacttttgtacaggtgtaaggaagggttccagtttcagttttctgcatagggctagccaattctcccagcaccattcattaaatagggagtttgttcctcattgcttgtttttgtcagatttttcaaagatcagatggttgtagataagcagtcttatttctgagttctgcattctttttcattggtctatgtgtatgtttttataccagtaccaggatgttttggttactatagccttgtggtgtagtttgaagtcagatagcatgatgcttccagctttgttctttttgcttagaattttcttggctatatggggtcttttgggttccatatgaattttaaaatagttttttctaattctgtgaaagatgtcagtaatagtttagtgggataagcattgaattacttttggcagtatggccgtttttacaatattgattatttctatcttttccatttgtttgtgtcctctctgattttcttgagcagtggtttgtgttttccttaaagaggtccttcacttactttgttagctgtattcctaggtattttattctttttgtagcaattgtggatggaggttcgttcatgatatggctctctgcttgtttactgttaatgtattgaaatgcttgtaatttttgcacattgattttgtatcctgagactttgctgaagcttcttattagctgaagaagcttttgggctgacattggggcattctagatatgggatcatgtcatctgcaaacacagacagtttgacttcctatttgaataccccttatttatttttcttgcctgattttcctggccagaacttccaatactacgttgaataagagtggtgagagagggccttcttgttgtgccagttttcaaggggaatgcttccagcttttgccctttcggtatgatactggctgtgggttcatcataaatgactcttattattttgaggtatgttccataaatacctagtttattgagcatttttaacatgaaggtatgttgaatttaatcaaagaccttttctgcatctattgagataatcatatggattttgtttttagttctgtttatatgatgaattgtatttattgatttgtttatgttgaaatagccttgcatcccagggatgaagctgacttgatcgcggtggataagcttttcgatgtgctgctggatttggtttgccagtgttttattgagaatttttgcatcaatgtttatcagggatattggcttgaagtttcttgttgttgttatatctttgccagatcttggtatcagaatgatgctgatcttataaaatgagttagagtggagtccctctttttctatcatttggaatagtttcagaagaaatggtaccaactcctctttgtacctctggtagaattcagctgtaaatccatctgcctctgggcatttttagtttgtaggctatttattacttcctcaattccagaacttcttattggtctattcaggattcaaatttttcctggtttggtcttgggagggtgtttgtgtccagtaatttatctacttcttctagctttttcagtttatgtgcatacaggtgtttatagtattttctgatggtttgtatttctgtggggtcagtggtgatatcctctttatgattttgtattgtgtctatttcttcttctctcttttgttctccattactctagttagtgttctattttattaatgttttcaaaaaaaatagctcctggatttattggttttttgaagggttttttgtgtctctatctctttcagtttcacttggattcttcttatgtcttgtcttctgttagctttggggtttgtttgctcttgattctcttgttcttttaattgtaatgttagggtgtcattttgagatctttccagctttttgctgtggctatgtagtgctataaattttccccttaacactgctttagctgcattctacagattctagtacatagtctctttgttctcattggtttcaaagaatttcttggtttctgatttaattttattatttacccagaagtcattcaggagcaggttgttcaatttccatgtacttgtgtggttttgagtgagtttcttactcttgagttccaatttgattgcactgtggtctgagagactgttatgatttcagttcttttgcatttgctaaggagtattccttccaattatgtgatcaattttaaagtaagtgccatgtgacacttaggagaatgtgtattgtgttgtttttggctggagagttctgtagatatctatcaggtccatttgacccaaagctgagttcaagtcctgaatatctttgttacttttctgtctcaattgttggtctaatattggcagtagggtgttaaagtctcccactattattgtgtgggagtttgtttaagtccctttgtaggtctctaataatgtgttttataaatctgggtcctccttgaattgattcctttagcattatgtaatgcccttctttttctgttttgatctttgttggtttaaagtctattttgtcagaaactacaattgcaactcctccttttttcttcttttatttgcttggtgaattttcctccattccttcattttaagcatgtgtgtgtctttgcatgtgagatgggtttcttgaatatggcacaccaatgggtcttgactctttaatcagcttgacattctgtgtcttttaatgagggcatttagcccatttaaatttaagattaggccagccacggtggcttatgcctgtaatcccagcactttgggaggctgaggcaggtgaatcacctgaggtcaggagttcatgaccagcctggccaacatggtgaaaccccgcctctactaaaaatataaaaattagcctgtcatggtagtgctcatctgtaatcccagctgctcaggaagctgaggcagaattgcttgaacctgggaggcagatgttgcagttagtcaagattgtgcactgcactccagcctgggtgacagaacaagactccatctcaaaaaaaaaaaaaaaaaaagtttaaggttaatattgctatgtgtgaatttgattatgttttcatggtgctatctggttattttgaagactctttgatgtagttttttcatagtgtcattggtctttgtacttcagtgtgtttttgtagtggctagtaatggtttttttctttccatgtttagtgcttctttcaggagctcttgcaaggcaggcctggtggtgatgaattccttcagcgtttacttgtctgaaaatgattttattcctcctttacttatgaagcttagttttcctggatattcttggttggaaattcttttctttaagaatgttgagtagtggcccccaatctcttacggcttgtagggtttctgcttaaaggtctgttgtcagtctgatgaacttttgtctataggtgatgtggcgtttctctctggctgccttatcatttattcctgaatttcaatcttgaagaatctgattattatgtgtcttggggatgatcttctcatggagtatcttactggggttttctggattttctgaatttgaatgttggcctttcttgttaggttggaaaagttcttctggatgatatcctgaaggatgttttctaacttggttccattctccctatctatttaaggtaccccagtcagtcataggttcggtctttttacataatctcatagacctcagagatttctctcattcccgtttattcttttttcttcaatcttgtctgcctgttttatttcagcaagattgtcttcaagctctgaagttctttccttgcttcgtctactcagttattgatacttgtggttgcgttgtgaagttctgatgctgtgtttttcagttccatcaggtcatttatgttcctctctaaattggttgttttggttaacagctcctgtaatgtttttcatggttcttagcttctttgcattgggttagaacatactccattagctcagcaaagttcatcattacccaccttctgaagcctacttttgtcaatttatccaccttagccaccgcccagttctgtgcccttcctggagatatgctgggatcatttggaggaaaggaggcactctggctttttaagttttcagcattttttggtttattcttttcatctttgtgagtttttctagcttcgatctttgaggctgctgacctttggatgggatgcttgtgaggatttttttgttcatgctgtttttgttgttgctttctgtttgtttttctaaccatcaggccacttttctgtagcactgttgtgatttgcttgggatctacttcagaccctatttgcctgggtttctctcacacctggaggtgtcaaccagtggagcctgcagaatagcagagaggactgcttgctccttcctctggggtctttgtcccagaaggggaatgatctgatgacagtgggaacactactttataagttgtctgacgatgtctgttgtgggggtctcacccagtcaggatgcatgagatctgggaaccacttaagaaagcactctggctgcaccttggtggagtggctgtgctgcactgagggaaattccatacatctgtactgcctggattgctcagagccagcagggggaaagactaagtctgctgatctgcagaaaccacctcattgttcctgttttatgtatttcttgtagataagttttttctcatttcctgttttactacctttatttttgttaactttatcgttacatgctttgattattttttcattttttgcatactttttataaatattatgtaatcaccttgaagtataatgtaatcatcttaaaatggagattacataaaacatcttttttttttttttttttttttttttttttttagtatttattgatcattcctgggtgtttctcgcagagggggatttggcagggtcataggacaatagtggagggaaggtaagcagataaacaagtgaacaagggtctctggttttcctaggcagaggaccctgcggccttccgcagtgtttgtgtccctgggtacttgagattagggagtggtgatgactcttaacgagcatgctgccttcaagcatctgtttaacaaagcacatcttgcaccgcccttaatccatttaaccctgagtggacacagtacatgttttagagagcatggggttgggggtaaggttatagattaacagcatcccaaggcagaagaatttttcttagtacagaacaaaatggagtctcctatgtctacttctttctacacagacacagcaacaatctgatttctctatcttttccccacattccccccttttctattcgacaaaaccgccatcgtcatcatggcccgttctcaatgagctgttgggtacacctcccagacggggtggcggctgggcagaggggctcctcacttcccagaaggggcggccgggcagaggcgccccccacctcccggacggggcggctggccgggcgggtgctggccccaacctccctcctggacggggtggctggccgggcaggggctgccccccacctccctcccagatggggcataaaatatcttaaagttaaaaaaataaggccaagcatggtggctcacacctgtaatcccaacactttgggaggctgagatggatagatcacctgaggtcaggagtttgagaccagcctggccaacatggtgaaactgtctctactaaaaatacaaaaattaggtatgtggtggaggacatctgagactgaggcaggataatcacttgaacccagatgacagaggttgcagtgagccgagattgcgccactgcactccagcctgggtgacagagcaagactccatctcaaaaaaaaaaaaaaaaaaaaaaaagtaaaaaagatatattttaacttcttaaactttaattaaatacaaaacctatactgctatgttttccagtttgttattgatactacaaattatattatgtatctattaacagatttatatcttgtatttttatatctacagaactttaacggttttatgcaccattatgatagtaaaaaattctatatgtatctgtatatttatatttaatagggagctttatatatggttttatgatgctgtctagcatcattttatttttcaacaaaatggattcattttagcatttctatttgtttatatgcagagtctgtgtttctcagactggatcttggactcctggtctcaagagatctgactgccttggcttcctaaagctgtagaattacaggcatgagccactatgtctggccaccatgtaacatttcttgttacatttcgtgcaacatttcttgttacgtttcctgcaacatttcttgttacatttcgtgcaacatttcttgttacatttcgtgtaacatttcttgttacatttcgtgtaacatttcttatagtgaacaccctgaaatttaatttaggaaagtctgtatttttattttgtttttcaagtaaaataactttgaattaaatattattggttagaattttttattacatcaaaatttgggaagttctcagctttcgttttctttaatttacctctgtattactttttccctacattattcttctcttttttttttttgagacagagtctctctctgtcacccaggctggagtgcggtggctcgatctcagcctcagcctcccgagtagctgggaccacaggcgcccaccaccacacctggctaattttttgtattttttcagtagaggcagggtttcaccgtcttagccaggacggtctcgatctcctgactgtgtgatccgcctgcctcggcctcccaaagtgctgggattacaggcatgagccactgtgcccagcccccctatattcttctaagatttatttcatgaatatattgatggacttgatggtgtccaataagttttacattccatatttttcttttgttttgcaattttatatttttatgttatatattttagggtatgccacctcataccaattaactgtgttttgatgttttagtttatattgtaattgtgtatgacaatgtttaactctgtacaatttaaggcagtttggagcaaaatcaaatataaatcagccatatgtctattgccaatataattatctctttttccctgtataaatattctctctgtattttttatgacttgtatatttgttatgtaggtttgttgtgagtggttgttcaatcttgtctaggtgagcagtcatctcctaatttcaatatctattgtgaatctatattatttttgtgtggaagaaacactcttggatttgaagattatatacaaactatcataactttgtgtcttttttaggtattattgtttatttttacttgtcagaaccacataacaaaatttattatcaaacattttaaaatatgctgtttaggccaggtgcagtggctcatgcctgtaatcccagctctttgggaggacaaggtgggaggattgcccgaggtcaggagttcaagaccagtctggctatcttggtgaaaccctgtctctactaaaaatacaaaaactacccgggtgtggtggcgagtgcctgtagtcctagctactcgggaggctgaggcaggagaatcacttgaacccgggaggtagaggttgcagtgagctgagatcatgccacctcactccagcctgggcaacagagcaagattccgtctgaaaaaaataaaatatgctgtttagtcatattaattatatgacaatgttatgcaacatatccctataatatttatatgttgcaaagctaaatctcaatacacattaaacaagaaccaatttttctgactttctggcactttgcaagcaccactctgttttctctttctaagagtgtaactgtttcatgtatcttctacagtctctttttgtggctggctcatttcattttgcataatatcatcaagctttatctttataattgttagaatatttttggctttttaagtcctaggtgatattccagtatttttatattttaaattatatctactgaataatttggtgacagaaatttgcattccttttacctactggctttcagtagcaatgctgcaataattatggatatgcaaataacttcatatggccatatatgtgaacatttatatatgtgctaacttctattttattagttcactttgttttgagacagtctcactttgtcacccgggctggagtgcagtggtgcgatctcggcgcactgcaacctccacctcccgggttcaagtgattctcctgcctcagcctcttgagcagctgggactacaggctcgtaccaccaagcccagctaatttgtttatttttagtagagatggggttttatgttggcctggatggtctcgatctcttgacctcatgatccgcccaccttggccccccaaagtgctggaattataggcgtgagccactgcacccagcctattagtccactttttagccattatactcataccaaattgtttttattctgtaactttgtaatgtattttgaaatcaggaactataatgacttcaacattgttcctttttttgaatactttgggtactttattgtcttttgagagtccatatgctacttttggagttgctgtttctgtttcctcaaaaatgcaatgagaaattaaaaaaaaaattgcattaaatctctgtattacattgagcagtatggacgtcttcaaaatattaattatttcaacctttgaacaggagcatgctggagaatgtgtttaatatctatatagttataaatttttcagtttttgtctgttttatactcatttcattttggtcatagaatgtaattcataaattgtttttaaaaacttaaaaattaaaaaaatttgttaagacttctttttttgcctaccaggtggtctatcaaggagaatgttgtatgagctactgagaagggcatgcatcctgatattgttgaggtgtcttctctatacctctgttagaaatagttgttttatactgccttcaagtcctctctttacttactaatattctgtcttgtgttatttttattacagaaagttgggtattgaaatgtcctaccataattatattactgtctaagtgttttttccattctttcaatatttgctttatatgtttggagacttaatgtaagatacaaacacacacacacacatatatatacataggttcccagtaaatgaatgtattattgtttaatgtctttgtctctttgcagttttgacctaaagtacattttataaactatgacagtttttgacttaagatgtagcttgtgtaatattattttggtctcttctgctctcatttggttaatatttgcatggaatgtctaaatccatcttgccactttcaatccttttttgtcattagattttagctgagtcttgtagaaaggcaagttgcatcttggtgtgagaaacaaactcacctatccaaacccaaagaatggactcagggacctggagaacagcgaaagtgagacttttaatgacggtcttgcaagattgagtgtctggcatacaggcacacgcagcacagtttcaacaaacaattatctcttagtgcacaggtccctccccctggttcctcataggctgactactattgggtcacagtcttcccagatgtcacctattggcaagggctttaggtgtttcttttacgagttgtcttgttgcattttgttgcagcccaaaatgcatcgcgactgttcaggactcttcagacatttgatttgtggccctagtggctgcacttagctgataagaaagggtacaattatctatgttgcaaactaacctaaattttttggtggggtggagggggtgtggttgcggggaccctgacctataggcgcctggctactgggtaaaagagaaggcaggaaggaggggggtgatgactcagtacactctgcttctttatgtctttatttccatgtaacctgcttaaaactaacgcacttagaattgagaatggaccatcacatataggttattttctacattggtttttttatttttatttatttatttattttgatacaaagtctcactatgtcgcccaggctggagtgcaatggcatgatcttggctcgctgaaacttccgccttccaggttcaagtgattctcctgcctcagcctcccgagtagctgggattacaggcaggtaccaccacactgagctaatttttgtatttttgctagagatgagatttcaccatgttggccaggctggtctcaaactcctgacctcaggcgatccgcccatcttggcctctgaaagtgctgggattacaggcgtgagccactgcgcccagccaaaaatttttttaataaatcactttattgaactcatgtcacttgagtggaaagttagttatatatatgtatgtgtatatatataaactctgaaacagaaagacattaatgttattttattgttgtatttgattcttgtatctttgtctctcattttctctcttaatttgtgtcttttttgtttttatgttgatatacttttacttctttcttattttgtttgtgtatctatacaaatatattatttgtgctatcttggggattacataaaacctctaaaagatacaacgatatatttcagtctggtaaaaagaaaaaaacttcagttacatgcaaatattttttctcattacatctgccctcaaatttttcattgatgtttgaattatattttttatgttgtatattaactaacagatgtttataatgatttctatgcttttaactttcaaattttagaaaataattaaaaatgttttctgcaccattataataatgcttaaaaattcaatttttgtgtttgtgcatatcttttccagaaaataatgtatttttctatgatgatgtgttgtttcattgaataatgttattttcagtagaagcaactgcttttagcatctttttatatgtagagcatacggagtaccaatgcactttttcagaatttggttattttttaaggttttttttttttatttagcaggacatatttgctgatggtattatactcacttgatagctatttttttcaggactttgactatatcagacagtacccttctggcctgcaaaatttttgttgacaatttactggctgtgtcataagactatgcttgcaaatgacatcacttttatcttgcagtttccaagaggctgtttttgtctgtgacttttgaaattgtgcttatatatgtgtttgttataaatatctttgtgtgtatcctagtttgttttttgagcttcttcatttttacgtcttttttttttttttttttttttttgagacggagtctcgctctgtcgcccaggctggagtgcagtggcgcatctccgctcactataagctccgcctccccggttcacgccattctcctgcctcagcctcctgcgtagctgggactacaggcgcccgccaccacgcccggctgattttttctttttttagtagagacaaggtttcgccgtattagccaggatggtctcaatctcctgacctcgtgatgcacctgtctcagcctcccaaagtgctggtattacaggcgtgagccaccgcgcccggccgtcattttttctttcaggatttttcagttagtctttttggtattttttgccttcataatttctgtttttctggtattttacatatttttgttcttaccctcatttttctgattttctgtagttctctatgtttctgtgtcactcactgagtattattcaatttgttttcaatttttaaaattaatatatacattttttatggtttctctctgaaacttttatatttttgataaaaccatattgccttattttgtatacattgtaatctttgattgaaatttgtacatttaaaaaagctacctgtcacaatccttataatgtagctttgtcctggcatagtctggacaattgtcttgattagagatactgggagtctctcaaacatgttgctagaatgtgtcttgtctacaattttgtgtttattttttaattaaaagagtttgtgtttcttctttttttagtttttttttttgtttgttttttgtttttttgtcagacggggtcttgctctgtctcccagactggagtgcagtggcgcaatctcggctcactgcaccctccgccacctgggttcaagtgattctcctgcctcagcctcccaagtagctgggaatacaggtgtacgctatcacacctggctaacttttcttttgtttttttagtagagatggagtttcaccatgttggccaggctggtctcaaacttgtgacctcaagtgatccgccagccttggcctcccaaagtactggaattacaggcatgaaccaccacaactggcctttttttgtttcttcttaatagtaataacttgctacacctgttttctgtgtgtggcactgcagtctctctgctgctgtaacatttagctttggtctcagcagacttaaactgtcattccaaagtataccaccatttctttcagcactagatgtcataggagacagaaaccagtgtatagataggtccctagaagcaagtaataaagatgtatgtggcagtattttaattgtcttttaaaaaagaaaccaaaagttggcagtggggagcaggaagagctgtgttgggtaaatttaacagacttttctttttcttctgtgtcactctctatgttgtgctcagctggggcacttcacacacttaacttatttataaattttcctcagatgtatttttgttggatgtttttgttacatttacatgtctgtaaaaaattagggcctttgggccaggcgcggtggctggtgtgccaaagtgcggtaatcccagcactttgggaggctgaagtggacgcatcatctgaggtcaggagttcgagaccagactggccaacatggcgaaaccccatctctactaaaaatacaaaaattagctgtgcgtggtggtgcgtgcctgtaatcccagctactttggaggctggggcaggagaatagcttgagcctgggtggcggaggtggcagtgagcagagatcacgccattgcactccatcctgggctacagaatgagactctgtctaaaaaaaaaaaaaaattagggcctttattattttgctatgccatcttgtttatgtagtttgtataattatatgggttagatttgtaaagcatattcatctgagtctagtaaatggagtaatttgttatttttatttctttcagttacatattctcattttgcccaagacctttggccagagcagggcataaaagattctttccaagaagtcatattgagaagatatggaaaatgtggacatgaagatttacagttaagaacaggctgtaaaagtgtggatgagtgtaatctgcacaaagaatgttatgatgaactaaaccagtgtttgacaactacccagagtgaaatatttcaatatgataaatatgtgaatgtcttttataaattttcaaatccaaatatacaaaagataagacatactggaaagaagcctttcaaatgtaaaaaatgtgacaaatcgttttgcatgcttttacacctaactcaacataaaagaattcatattagggaaaattcttaccaatgtgaagaatgtggtaaagtctttaactggttctcaacccttactagacacagaagaattcatactggagagaaaccctacaaatgtgaacaatgtggcaaagcttttaagcagtcctcaacccttactacacataagataattcatactggagagaaaccctacagatgtgaagaatgtggcaaaacctttaaccggtcctcacaccttactacacataaaagaattcatactggagagaaaccctacagatgtgaagaatgtggcagagcttttaaccggtcctcacaccttactacacataagattattcatactggagagaaaccctacaaatgtgaagaatgtggcaaagcttttaaccaatcctcaacccttactacacataagataattcatgctggagagaaaccttacaaatgtgaagaatgtggcaaagctttttaccgattctcataccttactaaacataagataattcatactggagagaaattctacaaatgtgaagaatgtggcaaaggctttaattggtcctcgacccttactaaacataaaagaattcatactggagagaaaccctacaaatgtgaacaatgtggcaaagcttttaatgagtcctcaaaccttactgcacataagataattcatactggagagaaaccctacaaatgtgaagaatgtggcaaagcctttaaccggtccccaaaacttactgcacataaggtaattcattctggagagaaaccctacaaatgtgaagaatgtggcaaagcttttaaccaattctcaaaccttactaaacataagataactcatattggagatacatcttacaaatacctagaatgtgataaagcctttagccagtcttcaactcttactaaacataaggtaattcatactggagagaaaccctacaactgtgaagaatacggcaaagctttcaaccagtcctcaaaccttattgaacaaagtaattcatactggagagaaaccctacaaatgtgaagattgtggcaaagcctctaacccgtcctgaattcttactaaacataagaacattcatactgaagaggaaccctatgagtgtgaagaatatggcaaagccttcaacaagtcctcaattcttaccagacataagataattctggctgggtgcggtggctcacacctgtaatcccagcactttgggaggctgagacgggtgaattacatgaggttgggagttcgagaccagcctgaccaacatggtgaaatcctgtctctactaaaaatacaaaattagccatgcgtagtggtgcatgcctgtaatcccagctactcgggaggctgaggcaggagaattgcttgaacccgggaggcagaggttgaagtgagctgagatcgcgccattgcactccagcctgggcaacaagagtggcactccatctcagaaaaaaaaaaaaaagataattcatactgaaaagaaactctacaaacttgaaagatgtgacagtgcttttgacaacacctaaaacttttaaacataaaaaatcatactggtgagaaatcctagaaatgtaaagaatgtgacaaggcctttaaatggttgtcacacttcattataggtaagatagttcatactgaagaaaacttctacaagtgtgaacagtgtggcaaaacttttaatgaatgctcacaccttattgcacaggagagcatttatacttgaaaaaaattgtacaaatataaagaccatgaaaaagccattaatatctattcacatcttaccactggagagttcatacttaataaaaggaatataagtgcaattactgtcaaaagatctttcagaaaatataaacctttaaagcgaagaaggtatttattttgaagatgaacactacaaatgtgaagagggttgtagtacctttatttgtatcacagattttattgtacacattttgtactagaagaaaactctgaagtagttgctcaaactttgttcaacatcagggaatttatattgaagaaaaactttgcaaatttaataaattttaaaaaacactttttcaaaaagtacagcttagaagacaccagagttcatactaaaatatatttttgcagatgcagtaaaaatgaaaatatttaatccaaaattaagtctatgtaaatatcagagaatttactgtagaaatatataaggcactgagacttcagatattatactaaatcagagtgctgagtatagaaaataaaactgaagttggggccaggtgcagtggctcacacctgtaatccagcactttgggaggccgagaagggtggatcacctgaggtcaggagtttgagaccagcctgactaacatggagaaaacacggctctactaaaaatacaaaattagccagctgtggtggtgtatgcctgtaatcacagctactcgagaggctgaggcaggagaattgcttgaacccgggaggtggagagtgcagtgaactgaaattgcgccattgcactccagcctgggcaacaagagtgaaactccatttcaaaaaaaaaaaaaaaaaaacaactaaagttggtagaaaaattatttgtatataactttaaaaggagtagaagggctttttgcagagttattacgtttgaagtatactttatttcttgaaaaaattacagattttttgtaaataatgatgtaattcaactctcaaaatatttcctactgtttctttattccagttgtattcacatgtgaaagcatgtgatcagttattgctgcattaaaaacatgagtcttttttattaggtggccattatttatgatcttttctatgaaagagtaaggacattaaaatgtaagatgcatgatgaaaaattaagtgaagaggctctttatggttaatttatattgaataatgcattaggtaggtgttcagagtaatattttgcgttgtgagaacatttttaattttatttaaaattaaatgaaaataaattagtatattattgtactaattgtacttttgtataataaaatccagtgtattttaaaaatgttaggttatgtgtggttaatattttaatccaatatttttaacatgttaaatactattgtgcattcaatgaagtgttattatgccacgaactttaacctgttccactttacttaaaggtatagatgaaagataataacaataaggggccaggcgtagtggttcacacctgtaatcctagcacttcgggaggctgaggtggatgaatcacgaggtcaggagttcaagaccagcctggccaacgtggtgaaaccccgtctctactaaaaatacaaaaattagccagttgtggtggctggcgcctgcaatcccagctacttgggaggctgaggcagaagaatcgcttaaaaccagaaggtggaggttgcagtgagccaagatcgcggcactgcacctgggtgaaagagtgaaactctgtttcaaaaaaaaaaaaaaagatggtaacaatatactatttggcaacatagtggattaacatcttgagtaatctcttttgtcagtgggtttaaactgcaaattagttaaagaatattgcttctgtaggttaaatttttctttttcaattatttaaatttatttttaaaatttttgtgggtacataatatgagtatatatttatgccatatatggcatattttgatacaggagtaccatatataataatcacatcagggcaaatggggtatccatcacttctagcaataatttatcctttgtattacaaacaattcagttctacacttttagttattttaaaatgtacaattgttatcggttacagggttatttttatggtcataataaaaaatatgcaagtataaataaaatccatacatttctgagtcctgaataaatattattaaaattttcttacatatatttttgaacatgtggcctgtctgcctacaaacacatacaaacttttagttttgatttacatagagttaaatatatattagtctaaagataaatcttagttgtaagaaaactatggaatatgagtttgtccctactttcagaaaaaaaaagagcaatataggaacaaaacaagtcattttaacaaggtgactactagaaaactaaaaacctcaaaaatgcaaaagcaaacatatactctctgctttgtattgaatttattactgtataatctatgccttatacttcggaatctccccatgcaaattctgtttatacttgcctggtactcatgatagacccctactttttggtattttgtatatttattttatagtttatgaaatattcattatgtgagctggaatgtgagtataagaataatttttatgaaatgtgcatacaaaataattttatatgtaattccacaattagtatattaagttacattttatttagctagaacactccattttgttttcaattggagaaccctatataagcttactattctttagttattgttctttttactttttataattgacaaagtaaatttatttatggagtcaaattgttcaggtaaatacaagggaagcttagtaagtcatgaagatgtttttacatgtaaatgtggaaagcatatatagcagttcttggtgtgtaacatgctccagaaaaagccataaacatttctgctaaagttagtttgtaacttcaagtcagagatagaaaatattagtagtgaagaaatacagctgatgttttatgtggagaggacacttccaggctgcaaagctgagtgttgctgaattaaaaaaaaaaaaaaaaaaaaaaaatgtggcctggcacggtggctcacacctacaatcccagcactttgggaggccaagacaagtcgatcatgaagtcaggagttcaagaccagcctggccaagatggtgaaaccccgtctctactaaaaatacaaaaattacctgggcatggtggcaggtgcctgtaatcccagctacttgggaggctgaggcagagaatcccttgaacctgggaggcggaggttgcagtgagctgagatcacaccactgtactccagcctgggcaacagagcgagactccgcctcaaaaaaaaaaaaatgctagctgggtgcggtggctcacgcctgtaatcccagcactttgggaggctgaggtgggcagaccacaaggtcaggagatcaagaccatcctggctaacacggtgaaaccccgtctctactaaaaatacaaaaaattaactaggcgtggtggcaggcgcctgtagtcccagctactcgggaggctaaggcaggagaatggcatgaacccgggaggcggagcttgcagtgagccgagatcacaccactgcactccagcctgggcgacacagcaagactccgtctgaaaaaaaaaaaaatgctgcttttattttcttcagatttgtttgtattatgtgtattctagctatgtatgcatcacagcccttatttttctatgttatggctacagttttctctttgttgtcttcatgccatttcatttcacatggtactttgtagattttgatgagaaacttcataatttttaatgccctgaaaaaatgtttttgttttctatttctttaagatggagtttcactcttgctgccaaggctggagtgcaatggtgcgatctcggctcactgcaacctctgcctcctgggttcaagtgattctcctgcctcagcctcccaagtagctgggattacaggtatgcgccaccacgtccagctagtttggtagttttagtggagatggggtttcaccttgttggtgaggctggtcttgaactcctgacctcaggtgatccacacacctaggcctcccaaagtgctgggattacagatgtgagccacagcaccaagcatgaaaaattgggtttaactggagagtttgcttatcaatataactttcagatcagtgaattaagataaaggcatacactgtccacaggtgagagaattaaatcagttgcatgggttttgtttgtttgtaaaagaaaaagcttattacattgttatacaaagtgtggcaaataaaaaatttgctagaaaatataccttaaaaattatttatttatttatttatttatttattttgagaaagagtctcactctgttgcccaggctggagtgcagtggcgcgatcgcagttcactgcaacctccacctcccgggttcaagcgattctcctgcctcagtctcctgagtagttgggattacaggtgcgcaccaccacgcccagctaatttttgtattttaagtagagacaggttttcaccatgttggccaggctggtctcgaactcctgacctcgtgatccacccaccttggcctcccatagtgctgggattacaaacactgcacggagactttattttttattttattttattttattttattttgagatggagttttgcttctgttgcccaggctggagggcaatagcacgatctcggctcaccacaacctccacctcccaagttcaagcgattctcctgcctcagccttcccgagtagctgggattacaggcatgccccaccacaccctgctaatcttatatttttagtagagatggggtttctccatgttggtcaggccggtctcgaactctcaacctcaggtcatccaccctcctcggcctcccaaaatgctgggattacaggcatgagccactgcatctggcaaaaattaaatttttaaaagagttaatggtaagtgaacaattttatattgaattctctgtgatataacacaacttatgtttccatgcagaatcttctaagcgtaaatgttaaaggttgcaaaataataaaatgacctctgtgaatttgcaatttggaagaattttttttccatattgatattgaaatttggaggaatttctctcattttgtataatttttttagtgggtgaagttcagtcttcagtttttatttttagtcacctaactatagccaactcctcagtcattttctctggataacttttggagatcctgacagttttgggattaaaacatttactgttagtttgcatgtaaactagttatactgtgttcacagagtggccagttatgggaccataggcaacaactgcccccttagtgtctttcataccattaccatcatcaccagaaactccaggtgccccaagcttaaagcaaaaatcctgaagtacatcagctcctcccttgcaacgtgctgggtttggaacatgctgttaaaatatcagagttcctggccagacatggtggctcatgcctgtaatcctagcaccttgggaggctgaggcgggcagatcacgaggtcaggagctcgagatagcctggccaatgtagtgaaaccccgtctctactaaaaatacaaaaacattaggcagtgtggtagcacacacttgtaatcccagctactcctgaggctgaggcaggagaatcgcttgaacctgggaggtgaaggttgcagtgagctgagatggagccactgcactccagcctgggcaacagggggagacttccgacctcaggtaatccacctgcctcggcctctcaaagtgctgggattacaggcgtaagccacagtgcccggccttgaactgttgattctatattttgtcttttatgaagagtgctgcaaacaacatagaagtgcaaatgttcttcattaggcattatctgtttcggacacatatccaatggtgcaattgctatgttacatggtagtttgattttaagttttttgagaaacctctatttcatttttcataatagctgtcttcatttacattcaaaccaacagtatgcaagtattcccttttcttcacgtctttaccagcactttattctttttctttttaataagagtcatattataggagtgagttgatatctcatagtgttttttggcttgcctttccctgatcataattgacaatgagcatttttaaatatttctgttggccatatgtatgtcttttcttgaaaaagacttatttaaggcttttgcttattttaagttatttcttttttgttgtagtcatttgagtttcttatatatttttaatattaactccttgtcacatgtatgatttgcaaatactttctctcattaattagttgtctcatcctgttgattgtaccacattctgtgcagcagctttataatttgaagtaatctgactaatctattttttcttctattccctgggattttgaggttaaataaactctctgcccaggacaatgtgatggggatttcactctattttttagtaatagtttcaggccttacatttaagtatctaatttattttcgttgattttttaatatggtgtgagataagggtctcattttactgtgctgcctgtggatatagttttctcaacaacatttattgaagatactgttctttccttaagaaatcatcacctttatttaaaatcagctagctgtaaatacacagatgtatttctggtctctttctgctcaattggcctatatgtctgtttttattcagtaccatactgttttagttactatagctttgtggtatatttcagtcaagtagagggatatcttcactttttttttttaattgctttggctatttggatcttttgtggtaccatatgaattttagatatacatttttaaacttcttttttttttttttgagacaaagtctcactctgttgcccaagctggagtgcagtggtgtgatctcggctcactgccacctctgcttcctgggttcaagtgattctcctgcctcagcctcctgagtagctgggattacaggcccaacatgtgcgcaccatcacgcccaactaagttttgtatttttagtacagatggggtttcacgatgttggtcagactggtctcaaactccttacctcaagatctacccacctcagcctcccaaagtgctgagattacaggcatgagccgccatgcccagcctactttttaaaatttctatgaagtatgtcactggtattttgatagaggttgcattatatccatagatcattttgtgtaatacagatacttaattactaataatgccaattcatgaatgaatattattttatgtgtatattacttaatttgtttaatgttctttagagtataatgcaagatgtttcaactttttggttatatttatttcaaagcatagttactaaagttagatggaattgttttttaatttcgagatagttattgtatagaaatgctgcttacttttggatgtagcttatttattctgaaagtctaataactttgtttattagttctaatagttttttgtaaagtcttaggcttttctatacttcagatgttgtatagaaataaaagattattatacagggataatttacattccttttttccaatctggatacttttgattttactctctaatttctttgtcttggatatttagtactatgtttagtaagactgactagagtgggcatccttgtcttgttctagctcttagagtgaaagcttgcaacatatccctgtttagcatgttattagctgtgcattttttggttatatgtggcatttattggctgaggtgcatttgttccatacctgtttttttcagagattcatcataagggagtgtcaacttttgtcaaacttttcttctgcatctatttctttctttttgtgctttgcatctatttaaatgttagatttgtgaaatcacaataaatcctacatagacaggaaaaatcctcagagactactatgaacatctctatgcctgcaaactagaaaattaggagaaaatagataaaatcctggatacacaaacttccaagattgagccaggaagaaacagaagccttgaacaaagcaaaaatatataaaatagataatgaaattgaattagtaataaaaaacctaccaagtgtgattcaacatgtaaagataataaaaccaaaaaatgatacgattaacacaatagatgcaaaaaaaagcattcaagaaagttcaacattcatgaaaatattctccacaaagtgggcattgatgaaacatacctcaaaataataagccatctatgacaaatcctcagctaacattatacttaagcaaaagctggatgcattctccattagaataaaaataagacaagaatatcaactttatcccttctattcaacatagttctggaagtcctagtcagagcaattcaacaaaataaagaaataaaaggcatctaaagcctggcgcagtggctcatgcctgtaatcccagccctttgggaggccgaggcgggaggatcacctgaggtcaggagttcgagaccagcctgaccaacatggagaaaccccatctctactaaaaatacaaaatttgctgggagtggtggcacgtgcctataatcccagctactcgggaggctaagacaggagaatcacttgaacccgggaggtggaggttccgatgaaccgagatcatgccattgcactccagcctgggcaacatgaacgaaactccatcccccccaccccactccccccaaaaaactcatctaaatagaaagagaggaagtcaaataatcttcactgattatataattctctacctagaaaacaaaagattttgggccaggtgcagtggtttacgcctgtaataccacactttgggaggccgaggcgggtagatcacttgtggtcaggggttcaaaaccaccctggccaacatggctaaaccccatctctactaaaaatacaaaagtagctgggtgtggtggcgcatgcctgtaatcccagctacttgggaggctgaggcaggagaatcattcgaacctgggaggcagaggttgcagtgagctggaatcacaccgttgcactccagccactccagcctgggtaacaagaacgaaattccgtctaaaaaaaaaaagttcaccaaaagactccaaagcttaatgaatgactttagcaaagtatcaggatacaaaattaatatacacaagtcacatttttgtataccaataacattcaaaatcaagaacagttttattttatttatttatttttgagatggagtttcactcttgttgcccaggctgaagtgcaatggtgtgatctctgctcactgcaacctccgcttgccgggttcaagcaattctcctgcctcagtctcccaagtagctgggattacaggcgcgcaccaccatgcccggctaattttttgtatttttagtagagacggggtttcaccatggccaggctggtcttgaacttcctgacctcaggtgagccgcccgcctcggcctcccagagtgctgggattacaggcatgagccaccgtgcccggccaagaagagttttattttgaataaccacagacaaaaaataatatacctacatatacactaaatcaaagaggtaaaatatctctacaagaagtacaaaacactactggaagaaataagagacaatgcaaataaataaaaaagcattatatgctcatggatttgaagaatgaatgtaattaaaatgtctatgctgcctaaagcagcctacagactaagtggtatttctatgaaactatcaatgacattttttatagaattaaaaaaagaaggccaggcgcagtggctcacacctgtaatcccagcattttgggaggccaaggcgggcggatcccaaggttcaagagatcgagaccattctggccaacatggtgaaaccctgtctctactgaaaatacaaaaattaccctggcgtggttgagcacgcctgtagttccggctactcagaagactgaggcaggagaatcgcttgaacccaggaggcgaaggttgcagtgagccgagattgtgccactgcactccagcctggcgacagaaccagactctgtctcaaaaaaaaaaaaaaaaaaaaaaaagccgggtgcggtggctcacgcctttactcagcactttgggaggccgaggcaggcggatcacaaggtcaggatatcgagaccatcctggctaacacagtgaaaccccatctctactaaaaatacaaaaaattagccgggcatggtggcatgcgcctgtagtcccagctactcgggacgctgaggcaggagaatcgcttgaacctgggaggcggaagttgcagtgaaccaagattgcgccactgcactacagcctgggtgacagagtgagactccgtctcagaaaaacaaaaacaaacaaacaaaacaaaaaagctattctaaaatctatatggaataataaaagaaccctaatagccacggcaactttatacaaaatgaataaacctggaggcctcccattaactgactttaaactactacgagttacagtaaccggtgtaacatggttcaggtacaaaaatatacatatagaccaatataacagaagaaagagccctgaaataaagctacacttttacacccaacttatttttgacaaagtcaacagaaataaaggggaaataactccctgtttaattaattgtactgggaagactggttagtaatatgcagaagaaaactggacgcctacctcttcccatataaaaaatgtaactaaagacatattaaagacttatctgtgagtcttcaagctacaaaaattcaagaacacctagaaagtactcttctagacactggcgtctgaaaaaaaaaaaaaaaaaaaacttaaaactaataaaagtgagtgcaacaaacataaaaatcagaaattggcatctaattaaactaaagagcttctgcaaagcaatagaaactatcaacgaagtggacaagctacaatatggaataaaatattcgcaaactgcatacaatgaaagattaatatatagaatctataagaaatagccaggagcagtggctcacgcctgtaatcctagcactttgggaggctgaggcaggtggatcacctcaggtcaggagttcgagaccaacctggccaacgtggtgaaaccccatctctactaaaaaaaaaatacaaaaattagccgggcatggtgacgcatgcctgtaatcccagctactcgggaggctgaggcaggagaatcatttgaaccccgggagatggaggttgcagtgagccaagatcgtgccacagcactccagcctaggcgacaagagtgaaactccgtttcaaaaaaaaaaaagaaaaagaaaaaaatttaataagaaaaagggcggcgaatgatatgaatatgcatttcccaaaggaagacgtgagagctgccaataaacatgcaaaaattgctcaacatccctaatcatcagagagatgtaaatcaaagtgacaatgtgataccatttcccagcagttagaatggctgttattaaaatgtcaaaaattggctgggtgcggtgtctcatgcccgtaatctcagcactttgggaggccgaggcggctggatcacctgaggtcaggagttggagaccagcatggacaacatggcaaaagccagtctctaataaaaatacaaaaattagccagcgtggtggtgggcatctgcagtcccagctacttgggaggctgaggcaaaagaattgcttgaacctgggaggcggaggttgcagtgagctgagatcgcaccactgcactccagcctgggtgatagagtgagactctgtctcaaaaacataataataaaaaatttaaaaattgaaaatgttgaagttgtgaagaaaagggaatctttatacactgttggtaaaaatgcaaattaatttagcctctttaaaaagcagtttggagatttcttaaaaaactaaaaattgagctgccatttgacccatacacctcattactgggtatctacccaaaggagaataaattatttttctaaaaagacatctgcggtcagccaggtgcgctggctcacacctgtaatcccagcactttgggaggccgaggcgggtggatcacgaggtcagcagtaagagaccagcctggccaacatggagaaacctcgtctctactaaaaatacaaaaattagccaggtgtggtggcaggtgccagtaatcccagctactcaggaggctgaggcaggagaactgcttgaacctgagaggcggaggttgcagtgagccaacaccacaccattgcactccagcctgggtgacagagcgagattctgtctcaaaaaaaaagacacctgcaatcagatgtttattgcatcactattcacaatagcaaagacaccgaagtaaaccaggtactcatgaaacttagattgaataaagaaaatgaggtccttatacaccttgcaatactatgcagccacattaaaaaaatgaagtaatgtcctctgcagcagcatgaatgcaacaaatggccattattataagcaaattaacacagatcaggaaaacaaatactacatgttctcacttacatgtgagaggtaaacattggatgcacatggaaacaaagataggaacaataaacactgggaattccaaaaagaagaaagaaggaagggaaaacaagccctgaaaaactacgtatctacaaaattagccgggcgtggtggcacatgcctgtaatcccagctattcaagaagctgaggcaggagaatcgcttgaacccgggaggtggaggttgcggtgagccgagatcgtgccattgcactccagcctgggcaacaagagcaaaactccatctcaataaaaaaaaaaaaagaaagaaaaactacgtatcaggtataatgtacatatgtacataacttgggcaatgggattattaagtgcccaaatgtcggcatcatgcagtatacctatgtgacaaatctgcacgcataccctcaaatgtaaaataaaaagaataaaatgctttgggctataacaacatcacatttttctagctcttggttaatagctgaaattaggggtgaaagacaaggaattatatcccctttgggcatggggtgaatgtttctattccaggtcaccccaaattttatgagctaacatctataaaagctcttggcctatagcccaaggttttcttctcaagtatgcagttaaaataaatgactctacatctttattttttattaactgtacgttagactatagagttaatttgtcactctgctctttggggaataaatattagtatacaacctgtattactttaataaagaaattatttctttagttttgattcttcaggatgattcaattccctggtgagagaataacttacttattaaggtaatagatgtagggaagactcattactcttgaccaacatctcccccaccaccagccccaggcaatcatcattctacactttgcttttattagtttgaattttttaatattctacatagaaatgagataatgtagccaggcatggtggctcatgtctataatcccagttacttgggaggctgaggctggagaatcgctttaaccctgggaggcagacattgcagtgagctgagatggggccactgcactcctgcctgggtgacagagagagactccatctcaaaaaaaaaaaaaaaaagaaagaaagaaaacaaaacaaaaaactacaactacataaacaacaaggcacttaacatgatcttcagaatttgtgggggccccacagatgtaacttcctgttgggggtctgggtgcagctagttgttgtaagtttctgtgctgcccatcatcctcatggaaactgaagctgggatggaaatttaaagggtaagatgaaacatgatgacagcaagaaagctgaagctcttaataatgaatattttttaaaataataatgccataaaatagtaaggtggctaaattacttgctgtaaacaaactcacaatttgaaaataaaattaattttttgcccatttcaagatagttgaacaggagtttctgaatgtatctgcttgctaggtctagttggcatattaaagccgacaattttttttttttttttttttttttttgaggcagagtcttgctctgtcacccaggctaaagtgcagtggtgagatcttggctcaccgcagcatccatctcccagattcaagtgattatcgtgcctcagcctcccgagtatctgggattacagacgtgtgccaccatgcctggctaatttttgtatttttagtagagatgaggttccaccatgttggtgaggctggtctggaacacctggcctcatgtaatccacctgcctcggtctcccaaagttctgggattacaggcgtaagccattgtgcccggccaaagccaacaattcttattgagaactttctacttctgccattaactgtcattttatgctttatatgttgggatttttgttaggtacaaatatatttacaactatcatattatcttgatagatttacaattttttcaatataacatgttgtcatttgccagttaattacaacacttttgtcttaacaccttctttttctaagtgtagccaccccagctctcttttggttactatctgtatgaaatcttttcatctaacctttcattgtaaaactatttgtgagtttagaactaaagagagtctcttgtagataacataaatttctcgaatccgggcgcagtggctcatgactgttatcttagtactttgggaggctgaggtgggcagattacctgaggtcaggagttcaagaccagcctggccaagatgacgaaacctcgtctctactaaaaatacaaaaattagccaggtatggttgcaggtgcctgtagtcccagctttactcaggaggctgaggcaggagaatcgcttgaacccagaaggtgaaggttgcagtgagccaagatcataccacttcactccagcctgggtgacagagcaagactccatctcaaaaaatataaaataattttaaaaaaacataaatttctcttcaatttattttatagtccctctctctattaatattttctatttgcagcatatttaggataggtaatttagactttttctaggctttctaatgcctaggcttcctctaagactttttctgttcatatctgttacttattcataggccatgttttcttatttctttgcatgccttgtatcttgttgctgaaaactggacattgttctactataatataaaaaccataaaatcttacgtactcttatcctttgggtttttgttcctgcttattttaacttgtacttttgtgcttagttttcaaaattattattaatattattattattattattattatttgagatggagtcttgctctgtcactcaggctggagtgcagtggtacgatctcggctcactgcaacctctgcctcttgggttcaagcaattccctgcctcaggctcccgaatagctgggattacaggcatctgccaccacaactggctaatttttgtatttttagtagagacggggtttcatcatcttggccaggctggtcttgaactcctgacctcgtgattcacctgcctcagtctcccaaagtgctgggattaccggctaaaagttattttttttaaatactgttttttgttgtgtttggcaataaaaatctgtttctttagcttaatgcgaactagtgatttgaaagagatttacctcaaatgcctgctcacctcaaatgtacatttcctaattcttgcagctgggtttacacagctaggaagattacaactttgccaccttcttctcttcttgcatgtttagagattgagggtaaagcagagatgagagagaacatcttcttaggtctttctgagcatttgcctggcctttgactgaccctgaacatgcttatgagcttctagattcttagaaatatgtggacaattttcaaagccctaatcctacaagcacttcactcctcagttttgtctcatatatactacgtgacttttgcttgcccagattgatattctttttcccaggtataatgagtagttaatttgtccttaaatatttttgccaaaaattaggttattgattctaaattgttgtttatgttttatgtaggtgtttactgctatgaatttctctgaacagtttgctgcatctcatatgtttgataggttgtggcttcattttcattcatctgaaaatattttcaaatttttttttttctttgacacattagttacttagaagtatgttttatttccacatatatgtgagtttctcaaactttccgcatttatttatttttactttctatgaaagtcagagaacatactttgggttatgtttatccttttaatttattgatgtttccttgctgtatggcctaccatgcaatctatcctgaagaataacctatgagtacttctctttttttttttgagatggagtctcactctgtcaccagggctggagtgcagtggcacaatctcagctcattgcaatctctgcctcctgggttcaagctattctcctgcctcagcctcccgagtagctgggattacaggcgcctgccaccatgcctggctaattttgtatttttagtagagatgaggtttcatcatcttggccaggctggtcttgaactcctgacatcaggtgatccacccgccttggcctcccaaagtgctgagattacaggcatgagccaccgcacccggccacctatgtgtacttctaatcttgagaggagatttctgtagaaggctatttatatttgttaacagtgttgttcatgtgttatattttcttgctgatattctgtctagtttttctattatttaaattcaggtagaaaagtttctgatctgacaacctcggccattggatttaattatttaacccattcatagccaatgatattatcaatatagttggatttacactggccattatgctttttgctttttttctttttgagatggagtcttgctctgtcgcccaggctggagtgcagtggcgctatctccgctcactgcaagctccgcctcctaagttcataccattctcctccctcagcctcccgtgtagctgggaccacaggtgcccaccaccacacccggctaattttttgtatttttagtagagatggggtttcaccgtggtctcgatctcctgacctcgtgatccgcttgcctcggcctcccaaagtgctgggattacaggcatgagccaccgcacccggcctctttttcttttttcttttcttttttttttttttttttgagacaaagtctcactctatcacccaggctggagtgcagtagtgtgatctccactcactgcaacttccacctcctgggttcaaacacttctcctgcctcagcctccagagtagctgggattacaggcacccaccagcatgctggctaatttttgtatttttagtagggacggggtttcaccatgttggccaggctggtctcgaactcctgacctcaggtgatccacccacctcagcctcccaaagtgctgggattataggtgtaagccaccatgcccagcatatttttattcttcctttactgctttcttttatattagatacttcccatataatatttaaatttctatagtgattgtttatgtttttgcagttactttctttttttttttttttttttttgagacggagtcttgccctgtcgcccagactggagtgcagtggcttgatcttggctcactgaaacctctgtctcccgggttcaaatgattcttctgtctcagcctcctgagtagctgagaatacaggcacctgccaccacgcccagctaattttttttatttttaatagagagggggtttcaccatgttggccaggctggtcttgaactcctgacctcatgatctgcccaccttggccttccaaagtggtgggattacaggcatgagccactgcacccagctactttcttattttctctaggccttataacatagatctttttataatctgcttcatgtttatattaacttaattccaatgagatataaaaatattacctctatatggttcttttgccttgatttagactgaatttagtttttatcaaaatgtatagggtaagccctaacctgcaatgtgattcttttttttttttttgtattttagtagagatggggtttcaccatgttggccaggatggtcttgatctcctgacctcgtgatctgcctgcctcagcctcccaaagtgctgggattacaggtgtgagccaccgtgcctggcagagaacagcaattttagaaagtgattaagtttaagtaagtttatgtgagttggatggaaaagccataggcactcaatgccagcttgtgaaagcagctgcaggggctgtactctgcagagccacaggggtggagctgcctaagaccttgggagctcaccccttgcatcaaagtggcctagatgtgagacgccaagtcaaaggagattattttggaactttaagatttaatgactgccctgctgggttttggagtttgatagacccagagcccttttgctttggcaaattctcccttttggaagaggaatatttacccaatgcctgcacatgcattgtatcttgaaagtaactaacttgtttttgattttacagactcataggtggaagaggcttgccttgtctcagacaagactttaaactggacttttgagttaatactgaaattggttaagaatttgggggactgatgtgaagggatgattgtgttttgaaatctgagaagggcatgaggtttgggagggcccaggggcagaatgatatcgtttgactctgtatccccacccaaatctcgtgtcaaattttaattgtattaatataggtaggggtccagttgtgttctgcataagatcagctttaaactttatttttaaaacaaaaaaagagccaatttttaatgataaattattttgcttcttatttttcagtttggagaacctctagtatatttataatattttataatttattgaatttatgatatcttaatacatgagataatttaaatactttataatatttcaagtgtcattttttcttatttcgttatgaaaattgctaatagatacatttttttctggttatcacaaaactatctgaaaatgtgacatttgccatttatcaaatcttcattgttaatactttacctgaatgggggcttgtaatatgtattataatttttcatgttgtcttaaattaattcggttttattattttattttatttaaaaaagctaaacttataaaattggttgtatattagtttaggtgaaattgcttagtgatgagagaaaaataatttgcaaaatatagagactggatagtttttttaatttttttttttttttttttttgagacagagtttcgctctgtcaccccggctagagtgaagtggctccatctcagctcactgcaagctccgcctcctgggttcacgccattctcctgcctcagcctcccgagtagctgggactacaggcgcctgccacggcgcccggctaattttttgtatttttagtagaggcttgttttataatttataatttagtgttagccaggatggtctcgatctcctgacctcgtgatctacccgcctcggcctcccaaagtgctgggattacaggcgtgagccaccgcccccggcggataattttttataataaaaatgttctttatgtttgccccttaccatttttttttttttttttttttgagatgaagtttttgctcttgttgcccaggctggagtgcagtggcgcgatctcggctcaccacaacctccacctcccaggttcaagcgattctcttgcctcggcctcctgagtagctgggattacaggaatgcgccaccacgtgcggctaattttgtatttttagtagacggggtttctccatgttggtcaggctagtcttgaactcctgacctcaggtgatccacccgcctcagcctcccaaagtgttgggattacaggcgtgagccactgtgcccagctgcctataccattttctttgaaagttgaagttttaactccctaattaggaaacatattcataaatgtgacttgtaaatactgaaatttgtgtttgctttttctgccttcagtagaaatggtgttttctagcatctatgtctttttaaaataaaagagaggatggaagcagaataggttgaaaatgctattaacaaaatgatgttgacagagatgatctatctggtctaccagggcataaaaatttcaaaaatcataatcagtacaaaacctctatgtccgttaatattacagaatattgcttgtgttaaaatcatttatgttggccgggcgcagtggctcacgcctgtaatcccagcactttgggaggccgaggcaggcagatcacgaggtcaagagatcgagaccatcctggccaacattgtgaaaccccgtctctactaaaaatacaaaaaaaaattagctgggcgtggtggcgcgtgcccatagttccagctactttggaggctgaagcaggagaatcgcttgaacctgggaggcggaggttgcagtgagccgagatcgagccactgcactccagcctgggtgacagagcgagactccgtctcaaaaaaaaaaaaaaaaaaaaaaaaattatgttaaaaactctgcctcgccgagtgcggtggctcacgcctgtaatcccaacattttgggacgccaaagcaggcggataacgaggtcagcagttagagaccagcctggccaacatggtgaaaccccgtctctactaaaaagacaaaaaagtagccgggcgttgtggcgggcgcctgtagtcccagctactccggaggctcaggcaggagaatggcgtgaacccgggaggcggagcttgcagtgagctgagattgtgccactgcactccagcgtgggtgagagagcgagactccgtctcaaaacaaacaaacaaacaaacaaaaaacaaaacaaaaaaactctgcctctcatgcatttagtagagataaagtcagagggcagaaccctccgctgatccttatcaggacacctgaagtacagatgatatatttctgttttctctcaaactccatattggatacagttattctgcttctaatccatattattacagtaatgcacagacacgggatcataaaagaacttgcaagctttttaaaaaagtgttatattttacacatgtgtgtatgtatttgtagacagctctgtcatcttggccagagtgcagctcaatcaaacctcaaaattcttagctctcagcctccttggtaaatgggacttcacgtacacaccactacagtggctaattaattttttttttttttttttttttttgtagagatggggtcttattatgttgcccaggcagctctttttttttttttttttttttttgagacagagtctccctctgtcgccaggctggagtgcagtggcgcgatctcggctcactgtaacctccgcctcccgggttcaaacgattctcctgcctcggccccccgagtagctgggaatacaggcgtgcggcatcacacccaggtaagtttttgtatttttggtagagacagggtttcaccttgttagccaggatggtctcggactcctgacctcttgatccacccacctcggactcccaaagtgctgggattgcaggcgtgagccaccgtgcctgggcgattctattttattcgttgatcttttgtggtgcttttacaattttacatctacatattataaatccagtaacaaagagtcataattgttgcttttaatagtgataggttgctttaaaactgaagggtacaatttagtcagatactttggtgctatgcaaatacaatgcttattttttaagtgttatttacaatttttacactcctcagttaaccttggatacaataataactggtggttttgtgatggtttctttagcattttatctatgttgattagtatttggaattctgtaaaaaaaaatttccctatccttttttcttttttatttatttaaagttttttgtgtatcagtgtaaatgcatgggtatttatttatttgacttgatttattttataggtcagtgctctaattattcatttggatgctaacattgttccaggatggaccattgggagttctttcaggctggctccctttgacatgttcccatcattttttaaaattaaaaaaaaagaaagaaaaaacattttgaggctgggtgcggtggctcacgcctgtaatcccaacactttgggaggccaaagcgggcagatcacctgaggtcaggagttcaggaccagcctggccaacatggtgaaaccccgtgtctactaaaaatacaaaaaattagccgagcatggtggcgcgcgcctgtgatctcatccagcagtgctttacttgtaattattttattcctgctgccgtctcctctttctttggccactatctgttccacccccggaacggaagagagatgttggtagggagaggctcttccttcacctctggcagaaaaggtttgcttgggcccttcacaccgctgacatcagagctgcacttcaatgtggcagttattggccatgtgtggcgcctggtctgaagtgcgatgctagaaaggtaaaatacagagttagtttcaaagatttagttccaaatatttatatactttattaataattacatatttctcacacattaaaatgaaaatttttttgatatattgggttaattaaattgttacaatcaattcaacctgttcttgtttctttttcaagtttggctactagaaaacttaaaattcacatatggctcacattttatttcagaggattacctcctttctaaaatctcagcctgcctgctcaaagaccagaaagaagccaggaaggtcataaaatctgaaattttaaaataattgttattataaaattatattttttcctttgtgaagagccatatattatttataaatgcatatgactttacacacaagtttaaaggcaaattccctctggggtgggcctggctcagctctgggaggaagccctgcctgagaaggctgcagcctaggctgtcaccctttcttcactcagcccagcaactgatcacatcttctgtcactcagggcacgagaaggtggggttttaaaagttatccaatcagcgacgctgggttgggaaccgtccaatcaggcctgcagctggagcggacaggacggcttcggggatgtggcggggcctttgtctctcgctgcagctggagctgcaggtctcgccttcactgccctgtgtcctctgctcgcagaggcccagcctctgtggccctgtgacctgcaggtattgagagatccacagctaagacgccaggtaccccggaagcctagaaatggtgagagtgccgggtccgacatcccgagagaggggaaggggcgggttgtaagcggtgggaagtggctgtggtgggacttaggcctccccgcagtcaactctacaatctgcgcccggagttctccttgctcagctcggcctcagtccccttcagccataagatggcggctgcgctgactgcgggatcccgggcgtcctgtcttttccctgcgcagtgactgggccctgacctggagtcctctcagggcagctctggaccctcagcggcgcgtctctcccggattgtgcagggaccactggagggtcccaggggtagaatcctgactcggggtgcgggtttatgaatgggtccgtggggttccagttcctcttctgttgaaaatgtatgggagtcaccgttaaaacactaaagcatttaatcaaagcgtgattcaaaaattgtggagcacccagctgtggtttgtaatttatggtttatgggcggggcttgaagtaaagacttttataaacagcatgatgaagaaaaccaaattcagtaattggttaggttcagatacatagtttcttaatttgtaaaataaaggtgaaaatttcctggttatgtaattagatgttaattggcagtttatagttggttaaggatgaattttgtttctctcaatgtagtaatttactaaaaatgcacctcagttagattttttttttttaagatggagtttcgctcttgttgcccaggctggagtgcaatggggcgatcttgtctcaccgtaacctctgcctcccgggttcaagcgatccaatgcttcagcctcccaggtagctgggattacaggcatgcgccaccacgcccgtctaattttgtggttttagtagagacgggtttctgcatgttggtcaggctggtctcgaactcccgacctcaggtgatctgccctccacggcctccccaaagtgctgggattacaggcgtgagccaccgcgcccagccagatttttttaaaagtaggaatccagggactagagacacctcagtctaatttcccgccgcttaattattttcacactccatggggaactgattttctggtgcatttttcaactgtgtcccaagcactgtcttaaatctaacctcccgtcccccatatctccagcctcactctggcttgcagtaagatattaaatttccagttcctcctggcattccctaatgccagcttttcctccctaattcacgttatcacctgtttgtcttttagtgtacttttgtataccatattttaattaattattttttgacaaagctttaaatgacgctttttaaaaggtttgttacctgtttgtaactttcccatgagaagaaagcaaagaataatcccctgacactgtattgtaaaatttctctgtgcctcttctccttgtatcttctctaggtacaaagatcttgtcagaatgtttttgggtcaaggtattcctttgaaacctttatgaggtgatgtgtcctcagccaccctttagtttttttctggtcgtgggtttcagtactgtctggggatcaaccaagatatccaccatggttatgtcagctaaagtgcctagtgaatatcagcttctggtttattttcttccatagggcgacctgaggtctggagtgtatcctctcaagggagcaagtggatccctggggcagagaggaagcttctagtgtactcttactttgaaaaggtaatcagatgctggtactgaggggaaaacacagaaataacatctgcctcctggattgtctaaggggtagaaatataatgaaataaatgtagtgaaagaaaaaatagtgttaaaaagaaaaaaaaattgtgacagaaaaaatagtatcccaaaagaccaaaaaagaaaaaaaaaatcaagcaaacaaacaaaaaacacaaaaaacctgactccagcagtcaggattttttccagcagttccattagcacttaagttttcccttttggagaagaaaaagatccccatgtcctatggtcttgtagatgcctaattctgtcacccatagccatcagcaaggttaactgagatggtgtaagagcttgcaaagtaaaatgcctctggagcagccaccgagaaatactgcagtgtctcctgaatgggtgcttcttgagcacataagtgagtaggagtgggtggaagaatctctcaagtgactgaatagcctgacttgaaacatgagtcacacacatctgttatttaaccatcattgccacttctggatttgtcaccttgaagagatttgttcacttattttgacctcagttttttagctgtaaattgcattatattagtagggcttgaaaggtaggaaattttttttttttttttttttgagacagtttcactcttgttgcccaggctggagtgcagtggtatgatctcggctcactgcaacctccacctcctgggttcaagtgattttcctgcctcagctggccaggctggtctcaaactcctgacctcagatgatctgccctccttggcctcccaaagtgctgggataacaggtgtgagccaccacgcccggccagcaggaaaatatttacaaagggcataaaagagatgggttttagaaaaagaaattaatgcttaattatatattccatttgttaaaaattctcatttacctttttctttcccagagtgagtttaaaaggtttctcaggtgtgtttgttttttatggctaggtgaattcaaacagaatttcaaggctcagcttttagaatgctagctaccgaggaaaagaatagggaaaatctctattctattttggctgtagaaaatgaatacatgtccataagaaaatgtggtagataattggtgagtaaacatagattcatgaaaacatcagttgctctatctgcaggataggatttttgacagtgaatatctgtgttcacatcctgttatcttgatttctgagtttcatgctacattttatgagatgaaacttggtaccacctagaagtgttcccatatgactaattgtttactacatgatttttaatgaaaacaatacaataatagatatattttcataaaggagtagatacttttgctttttttattgaggtataaaatgtaagtaccttaaaatttccttcccttatatgaacactgtgtttgagtaattttgctggatttttcaaacacgtagtttcaaaaaccaagtgagtaactctaacatggaaactaaagcttgagcccagtgtctcagagctaaggctaatattgagcctacaaaaggaggttattaaaggaccagctagtttatttatgggggatgctcccctgcagatgtccagtctgctcaccccagccatggaagaagcctttctgctgacagagccctggaaagctgaggacccacaggcaaatgcagttaaggttaagatgaaaggggactgagagggtcttactgatgataaagttgttattgttttgaggcagtttctaggctttggaatatcaaacaaagttaggtttatgtaaaaaaaaaaaaaagaattccaaaggagtattgcaacaggaaaaagtaccaactataaaaattttaaggattgcatagtttaggccaacaagggctttctttcctagggagcagcaaacaagattagaaagaaggcaggagagcaatggcaaatgaagggtgaaaagtcagattttaaatcagagaatgttttaccatgaaatcagcatgttcttagaagagacataaaatgagattttatgttgactcagactgagaatagtttaaagttctggggcctgtgaaaaattttatttagaccactgaagacaaattcagctgaatcttttaatgggaaaaagaagaaaatgtgcagagttcttactagaacaaggtcccaattcaagccccacaagagggttcttgatttcgctcaagaaaatattcagggtgagtccacacagtaaagtaaaaggaagtttattaagaaagtaaaggaataaaataatggcttactccataggcagggcagcaccgagggctgctggttgcacatttttatgcttatttcttgattatatgctaaacaaggggtggattatttatgccccccaattttagaccatatacagtaacttctgatgtttccatggcatttgtaaactgttacgacactggtaagagtgtagcagtgagggtgaccagaggtcactctcgtcacatcttggttttggtgggttttatttgacttctttactgcaacctgttttatccgcaaggtctttaaaacttgtatcttttgctgaccttctatcctgtcctgttacttagaatgcctaaccatccaggaatgcagcccagtcagtctcagccctattttatccagcccctattcaaaatagattttctctggttccatatgcctctgacatctcccccttctttttaacatgggcacacttaatcctaagagttgtagagggatgaagattcattttctgtaactacttcatgctgaacaggggtgatgatatttttgcctaactagtcagagtcttcttgaccctgaaaaacaaaacaaaggatcagtgacattttatgcaaagtcaaaaaatataacttcagtcttctattagttcagtccattcagttaattcctattctgtttgatagtcatgaacatttcagttctccatgaatactgaaagttttttctgtattctaatgtcacaatttctaaagttacaacaaacttgcatttgagaacatctgtcaaagtcttaagttaactataaatcatcttttgaagaggatcaacacaacttgattgtctgcatgggaaagtcttagggcagtctcagcaaaaaaaaaaaaaaaaaaaaaaaacatgatcgacaaggaaatttggttagctctgtggcataaaataattttatgtaacaattgtgattattaatgatatacacttagtcattagaattacaggagtttcccataattttggaacacataccaataacatatttacaaaaacagtccaaaaatagtcaaacatgatttcacatttgacatgttttctatgtgattttttatactaaatgagccaaattttactattatatttgtgtattattaatgtcaaacccaattcttaatctttatagacaaacctatccaattttagtatttgaccgtaaggtaatattcttataaaccttttataactctttacaaagtccttgttgtttaagagtagatcagtgctttaagagaaacctgttgtttttatctcaatgttcaatttatagaaaaactgaataatacccatttaactttatatgttcacacacagaaactcttttgcaattaaattttagcaaatctttcacaatttgtttaaaccttcagttttattctaatttaaaacaatcctttaaccttttaatccaggcaaaaaagtccacatttccatgtcttcttataatcttttatcaaaaacacatttcactttctctgcataccttgcatgtaaaactgttttttagtagtcaaagttacatgttacaatgttaactcttagcaacttttacttttgatgaaacccttggtaagtaaaggattttaattacgtactaggcgtggagtccaggacacagacacaagtttatataaggtctgactccagtgtattaatagttagggggtgtggctaacttgatgtgtcccaggccttacctagccgtaaagcaggcaagttgtacagtgaacagtgatagtggcattttgagaagtctttaagaggcctagtaacctttaaattgtacaacatttcttgcataaatttcttttagtgaattatttcatgacttatacagaccatctataatatgtttggactctctgatttgtcctaaacatccatctttttaaataaccagtcattttattttaggataataatttactatacaacatcttttcttatataaaatctcttttctttataacctttgtatatttagggggcatggctaattccatatgtcccaaggccttatttggaatctactggcttcaagataggtaaattgaacaatttttaaaagtcaaagaaccaatttatgaccttaaagtatttggcaaatctaatatctgacctatataatttagatcaaatggtttatattttgaagacatttttattttcccaatgatctttaaaactgtttttatttcaaaaagattacttgtcacatgaactaaaaggcattgcactttttacttttctgacaaaatatttgatttaagctcttattatttttaaaccaattaatcagggttcttttatatcacacacacagacagaagattcagtagttgtaaggtttttctttgtcagtttcttaattggattactagcccacgaccaggaaagcatgtagtttctatggcttaataagtaaacagctggacaacaaaatggattccccctaaattaaggctcccatttttacatcagatcttgtatctaaaaaggagagaatcagttcatcccaagggaagtcttatttctcagtgggacatggggacacctccatacttcctaagtggtccagagtatgtttctctgatccaaatgtgaagagctgagtttttccccataattgcccttagccattccaaaagtatatttctcacccagttattacatgccaaagttcttttataatgtgaagtaattcctgatacccccaaaagtaaaaaacatcagataatgcaatgcaaaacagaagagaaacttagattttgagagggatctattcacttccaattcctggggtttcataaggaaaaagaggtgtttcccaaaacagggtctatagtgtctcttctgtttttcccaaggagtcccaggctgctagagcttgaatatctgcttttaattaagctgacttttaaccatagtgctcttttaaaaagtccttttaaatttcttattaccagactttagtcaggtcaaacggccaatatctctggtttttgaattttaccaaaagtaacttcacaggtgttctgaaaaaggaaaattcaaggtggtttctggaggggaagagaatcaacaaatggtaaagctcacccaaataccaaacaagaaagtactcattccctaagctgagaatggaaccctgaacctgggccaccattaatgatggtggagacaagagaaagtactatcatgtggtcacaaggtcaagcgtccaaggacatgactgagcactttgctgggccatcctgaacagcagccttaaagggtcctaggcctgcattctatcctaaggaacccctcttaatgacagaaccatacagaaagacaaatttatagcacagagtacaacagatttgttacagcttaagactaacctcacaaatgcatctccaaattaattagaactttacataggagataaacagtaattttttttaccattcattccatcagtttacatagagaggctagaattctggtaagaaatttgtacccttttgccagcatgccaggcttctgggcttcctttccctgggttgccctagtgacgtggctggctgcaccacagccctgggggccaagccacaatacaaaggaaaattatctttttctattctggccatagcaaaatatgtgtgacaacacagacattagctactctccttagcaaccaatatcaaatgcaactcttaaacttggccccagttgggccctgtcatcattaattcaacctctgatcaggagtttcaacttgaggcctctgggcaagatggttactctgggaatagaaaagataagaaagggaaaagagagaaaaagcattgcctgtggcaggttggggaaggcaaagagctcagggggccagagaaagacctacccattgcagtgataataaaaagttgaggtggctgcttcttggtaggaaagattttttccagcagtcccattagcacttaagttttcctttttggagaagaaaaatatccctatgtcccatggtcctgtagatgcctaattctgtcacccatagccatcagcaaagagtgcaagacagattaatccaaagagaatagcaatgaatatcccgtagtgtcaaaccagttcttgctgagatggattttactgagaggtttacccaggtatatgcaccccactcacccaaagtcagccagttggtgcacacagatgattttcctttgggtcagagtacagtccctttgtggttgccagaaagatgttactggaaagaagttctgttccagaccccaagagagggttcttggatctcgctcaagaaagacttcagggcaagtccataaagtgaaagcaagttaattaagaaagtaaagcaataaaagagtgactactccataggcagagcagtcctgagggctgatggttgcacatttttatggttatttcttgattatatgctaaacaaggggtggaatatttatgcctctcctttttttttttttttttttttttttttttttgagacagggtcgcgctgttttgccaggctggagtgcagtggcatgatctcagctcactgcaacctccgcctcccgggttcaagcaattctcctgcctcagccaccgaagtagctgggactacatgcacatgccaccatgcccagctaatttttgtgtttttagtaggacggggtttcaccatgttggccaggatggtctcaatctgttgacctcgtgatccacccacctcagcctcccgaagtgctgagattacaggcatgagccaccacatctggcctatgcctctccttcttaaactgctataagataacttccagatgttgccatggcatttataaactatcatagcactggtgggagtatagcagagaggatgaccataggtcactctcatcaccatgttaattttggtgggttttatccagcttctaatactgcaaactgtgttatcagccaggtctttgtgacctgtatcttatgctgaccttctatctcaccttgtgagttagaatgcctaaccatcttggaatgcagcccagtgggtctcagccttatttttactcaggctctattccaaatggagttgctctggttcaatacgcctctgacagaatctgtgtctggctatgtgataaataagaaaagagagcaccatctaagtcataatgggaagggtgtttctttccataaactatttctagagaacacaaaggatgaaggattttattaatcacagctatttacccagattatgtttgtgattcatcattccccacctcttttctttgtcatgtacatttcttccatttgacttttcctgggttgtactttttataataaactagtaaacataactacagtgttttgctgagttctgtgagtagcttgatctaattattgaacttgaggaagtttgtaggagtccccagtttttaaacagtagctcagaagcatagataggcctatgcggtttgtgactggcatctacaatgagggcaatgttgtgagactaagccctgaatcagggtctgtgctgactctgggtggtgtcagaattcaaatgttagacattgagttgctgttggagaattgcttggtattaagctaactctacagatttggtgccagaagaaagatatcacagaggcctgtcctggaataaaactcttggtatctggaaatgggaggctctgctctcctgtacacaggctttcacactgcccattgtcctgggatcccaggcctcctcccagggtgagagaggatgaaaacttagaggaaaggagctctgatgacagacccccttttcccacagctgccaccacaggattcccacccactcccaaacatgcccactagacattgacatgtgcacaccactcccaggactaggcaccaccctcaggaatttcaccacagcattgttgattttagtgtttcttgacaaaaagccacaaaagtgtcaagtctcctggcatatcccaacccccagacagtgaatctgcagcagcaaactattttccccagcaacctagagttctgggcctcctgttcctaatctcatttaactgcatgggcacagaaataaatcagagtccagccccacctgggccactatctgtaaaacaaaaactccgtccacttacattgcattcttccccacgcatggattttttttttctttcaacttttctttttggttcagggatccatgtgcagctttgttatatacgtaaaattgtgtcatggggttttggtgtagattattttgtcactgaggtactaagcataacaccaaacaggtacattttctgtttcttttgttctttcattgtctattctcaactaggcctcagtgtctgtcgttctcctctttgtgtccatgtgttcttattatttagctcttatcaatgagaacatgcatttggttttctgtttctgttttaggttcctaaggataatggtctccagtgtcgtctatgttgctgcaaataacttaaactttttttttttttttttttttgagacagagtctcgctctgtcagccaggctggagtgcagtggtgcgatctcggctcactgcaagctccgcctcccgggttcatgccattctcctgcctcagcctcccgagtagctgggactacaggtgtctgccaccacgcctagctaattttttgtatttttagtagagaatttttagtgttagccaggatgatctcaatctcctgaccttgtgatccacctgcctcggcctcccaaagtgctgggattacaggcgtgagccaccatacctggccttgcaaataacttaatcttgtttttgtttaatttatttattttttgagatggagttttcactcttgttgcccaggctggagtgtgatggcgccacctcagctcaccacaacctccgcctcctgggttcaagcaattttcttgcctcagcctcccgagtagctgggattacaggcatgcgccaccactcatggctaattttatatttttagtagagatggggtttcaccatgttgcccaggctggtctcaaactcctgaccgcaggtgatccgcccgcctcagcctcccaaaatgctgggattacaggctgagccaccacgcccagcttgtttttttttgtttttgtttttttgtttttttattggccacataatcttccatcatgtttacataccatactttgtttttattaaatcttctattttatttaattaattaattttatttggagacagtgtttcactctgttgcaaaggctgaagtgcagtggtgcaatcttggctcacttcagcctcaaccttccaggctcaaggcaccctcttcagccccctaagtaactgggactacaagcatgcaccaccatacccagttaacttctttttctatcgtttgtagagatggggttttgtcatgttgcccaggctggtcttgaactgttgagctaaggtaatccacctgcctcggcctcccaaagtgccgggattacaagtgtgaaccacctcacctgaccataccttattattttaatctagtctacattaataggcaattagatttgttccatgtttttgttttttgtttgtttgagacggagtctcactctgttgcccagaccagagtgcagtggcaccatctcagctcactgcaacctctgtctcctgggttcaaacgattctcctgcctcagtttcctatgtagctgggactacaggcacatgtaaccacacctggctaaattttgtatttttagtagagatggtgttttgccatattggctaggctagcctcgaactcctgacctcaggtgatccaccagcctcagcctcccaaagtgctgggattactggcatgagccactgagcccagcccatgtctttgttattgcaaacagtgttgtaataaacatgcatatgcatgtgtctttatggtagaatagtttatatttctttggatatatactcaatttggaggttgctgggtcaaacagtaattctgttttcagttctgtgaggaatcaccacactgcttttcacaatggttgaactaatttaccctcccaccagcagtgtataaacattccattttctctgcaaccttaccagcatgttactgactttggtttttgagacagtctcactctgtcacccaggctggagtacagtggtgtgatctcagctcattgcaacctccacctccttgattcaatagattctcatgccttagtttctggagtagctggaactacagatgtgtgccaccaagcctgactaatttttgtatttttagtaaagataggatttctccatattggccaggctgctctcaaactcatgacctcaagtgatctgcctgccttgacctcccaaagtgctggggttaccgcacccagcctgttactttctaacaacagccattctgaatggtgtgagatggtgtctcattgtggtttttgttagtttgtttttggcatttctgtagtgattagtggtgagcattttttgcacatgcttgttagccacatgtttgtcttcttttgaaaagcatctgttcatgtttttttgcctactttttaatgaagtttttttttctgtaaacctgcctaacttctttatgaattctgggtattaaacctttgtcaggaacatagtttgcaaatatttttgtttatttggtatgttgtctgtttactccattgatagtttcctttgctatgaagaagctctttaattaggtccctgttgggaaaaagctgggtgttgggagggaaactgaggcaggccttgcataatgtcctctggaatgtgtctagacctgctggctccttgcttctagctttcctaggttcctattcccattatctcaagtagcagaacatgttccttataatgctaaaccatcacagctgtagatcatgcgcctgctcttttgacctccacgttctcaccacctgtttctttgttggattatcagtaaataccgtgggctcccagagctcagggccttcacagcctccataatggtgatggccccctggtgttccatcttttattttttttttgagacagagtctcgctctgtcacccaggctggagtgcagtggtgtgatctcagctcactgcaagctccgtgtcccgggttcacgccattctcctgcctcagcctcccgagtagctgggactacaggcgcccgccacgacacccagctaattttttttttgtatttttagtagagatggggcttcactgtggtctcgatctcctgacctcatgatccgcccgcctcagcctcccaaagtgctgggattacaggcgtgagccaccgcgcctagcctggtgtcccacctttatatctcaaactgtcttttttctcaatcctttgactccaccggactttgtcacccccacgacctgatgttgggtctgatcaccccaagaggtcccatttgtcaatttttgcttttgttgcagttgcttttggtatcttcatcatgatacatgtagatacgtgtggtaagacagtgaaactccagggcctcatatgactctatggtgaggccagaatcaagtatgaaggcttcaagatacattcctgagagttaagtgccacatttgcactaaagggtggcttcaggacctgttctgtttgggtttggtagggacagggcagtggcccatattttcatattttcattactgtagtagaaattgttggtgtctgtggcaggggagggcacctgtggacggtaaaagaggaacatatatttttatttccgtggagcaactcattgttcctgaatctcttctgttataaaggagaaagatgagtggactttttggtcttggtccttctgtctgtgagtgtgaggctagtaggtaagcaggtggtgctgatgcctttaagggacttgtctcaagatgcaggtgttacttgtccagagaattttatctgaaaaggatttctagaggaggagaaagaggaaaaatgcttcttttcagctaaacatatctcagatcaagagctgtgtccactctgcctcctggagtgccatgagtttagtacttgcaaacctttacttctctacttctgttttccctccccaatgattttgtttcacatacttttaaaaattcttgtgatagtcaaggatctctaaaaaatatttctatcctatgtacgagagccttctctacatcatggcttcttatatgcaatgcagaattcctaccatgaatttatgatctgccatattaaaagtgttccttttgtggctgctgaacatgggaagatgtggatactcaagattcctattgggggaaagctggggtccttagtaaagatggagaacatataatgttgaggtgtcgcttgtgttctccattagctctatgcagaacaggattaagaatatgcttatttaaacaggatggcatttatttatttatttatttatttttattgtttgagacagagtctcgctctgttgcccaggctagagtgcagtggcgcaatctcagctcactgcaagctccgcctcctgggttcatgcttttctcctgcttcaacctcccaagtagctgggactacaggcgcccaccaccacacccggctaattttttgtatttttaatagagacggggtttcactgtgttagccaggatggtcttgatctcctgacatcatgatccgcctgcctcagcctcccaaagtgctgggattacaggtgtgagccaccacgcccggcctgttcaggatagcatttattacccaggaagttctggagaaaattattcagagatacctgctttctaggatgctaaagaaaggactacttaaaatcattactaaaaattatagaacatgggagatatcttgaccttcgcatgaaactgattttttctttatggttaaattcagtctataattgactttttgaggggcaatatctcagcagtgatgttgtgttcttctttgtgcatcagcacatcataaaaatttattctagtgttgttgatgttaataatttgcttggttaaagagctctctgactttttttcactatagagttaattgtttttctctttattgttaagtatctttatgtagctaataaactatcacatttaatctggcacctgcccttttttcttaggtttttttgtttgttttttgcacatatgtgtctttggaaaatgaaggctcttatctttgtttacagaccaaaaaagttgggaaaaacacaatctctttcacttactgaatgtctgacaaaatagtcttctggggtcaaaaacattggcattgctagtaaccttgttagaattttaaaaactcagactttattccagatcttctggggaaaaaaaaaaaaagcttcacaacaggatctccagtttattgtacatatttaaatttgagaggtaccatctaactcaacatgtctttttttgtctgaaaaatatacacaactcattatgatgtaaatatagcactcaaaaatgtatacgtttgtgtccttaattatattctttatcatccagaaaagtattatatatgcactggtgttgtggatcttatgccattctctgccctcagagtaatacattagagaatatttctgtgttaaaaattattggataatttcagttattcttataagtcaaccaattctctttactctctcatttcaccttaattcaaataataaattctgcccatggccacttggtaaatatacgtgtgtctgtgcgtatgtgtttttcaggagacgttgacatttagggatgtggccatagaattctctctggaggagtgggaatgcctgaaccctgctcagcagaatttatatatgaatgtgatgttagagaactacaaaaacctggtcttcttgggtgagaataactttaatacataagtcttaatataccctaaacgttttatgtctctttttttgtagaattttctttggtaatttatgctttgtataaatgagtttctgatcccagttttcaagaaaatcttgatgatttgtctctgtagaaaagaatttcttcaacatgtttcatcctgacctgaactttccacattcctgagctgatctgcatccttcactctagattagtggtaattccagaaatttggtggcataaaatattgcccgtatcttaaaatctattttccactgtcaatttttgattcatgagtaccaggtagtgaaattaaggacctacaaatttaaaatattttctaaatagttagagatgtgtctcattaattagtattttaggattaattttctaaaatattctattatatcctttttactgagcacagtactaggttggtaactagagaatataagcaagatttatgctatttacttttaataaagcaggtattgctgtctctaagcaagacccgatcaccagtctagagcaagaaaaagagccctggaatatgaagatatgtgagatggtggatgaatccccaggtaggtgagagtgaacacaacagatgacacagatgagaggtacaaaggtaaaaaaaaaaaaaaagcaagccggcccttacaatgtgatttgggaagctgttttgcaaagtatatagtttctgggaagactgaatattttcttaaaattttctctcactaaagggcatcttctgtcttatgcttttaaattctctaagaattttccttttccttgggtgaacacacaaatatctgcataattttgaaaaacactgtttttttttgttttgttttgttttgttttttgagacagagtttcgctttggttgcccaggctggattgcagtagcgtgatctcaactcactgcaacctgtgccttttgggttcgacgattttcctgcctcagtctcctgggtagctgagattacaggcgcctgccaccacacccagctaattgttttgtatttttagtagagacgggtttttaccatgttggccaggctggtcttgtactcctgtcctcaagtgatctgcgcacctaggcctcccaaagtgctgggattacaagtgtgagccaccgtgcccagctggaaaactctatgttacattattttttagttctctttttgcatcctgtctgaaatatgtgagagtagtggtttctgttccattaggggtttcttgttaatttttctgcatagtccatcctgtttttattactatagtcttaaaatatagtttgaaattataaattatgatgtcctgtccctctgctttgttcttttttttctcaagaatgctttggctatttgaagtttattgtagtttcttgtaaattttagaatcgtattttctattgtgaaaaaaatgccactggaattttattaggaagtttattgaatgtgtagatgactttagataatatggcactttaacaatatttattctttcaatccatagacatgaaattttgtgttgttgttgagacagagtctcgctctgtcacccaggctggagtgcagtggtgcaatctcagctcactgcaacctccactttccgagttcaagtgattctcctgcctcagcctccctaatagctgggattacaggcatgtgccaccatgcccggctaatttttgtatttttggtagagacggggtttcaccttgttgtccaggctggtctcgatctcctgaccttgtgatccgcccaccttggcctcccaaagtgctgggattacaggcatgagtcaccatgcccagccgacataaaatatttttaaatttatttttgtcttctctaatttctttcattgatatcttatatatttcattgtaaagattttttaccttggccagccgcagtgtctcacacctgtaatcccagctctttgggaggccagggaggtggatcccctcaggtcaggagttcgagatcagcctgaccaacatggagaaaccccgtctctactaaaaatacaaaagtggctggccatattacaggcatagattacatgcctgtaatcccagctactcaggaggctaaggcaggagaatcgcttcaacccaggaggcagaggttgtggtgagccaagatggcaccattgcactccagcctgggcagcatgagcaaaactccatctcaataaaacaaaaagattttttaccttcttggttaaattggttttcagaaatttattattttaatactattataaataagattgttttctttattgcatcagatagtttaagtgtatggaagcataacgtatgttaattttatattttgctaatttactgactgtatttattagtttagacaattttgttgttgttcaagacagagtctcactgtgtcacccaggctggagtgcaatggcgcgatcttagctcactgcaacctccacctcctgggttcaaatgattctcccgtagcctctcaagtagctgggactacaggcgcccaccactacacctggctaattttttttgtagttttagtagagacagggtttcactatgttggccaggctgttcttgaagtcctgacctcgtgatttgcccgcctcggcccccaaaagtgctgggattacaggtgtgagccaccaagcccggctttttagacaaattttaatgtactgtttatggttttttatataataagatcatactatccacaaaaagcaactttttacttatttctcttcaattccaatggctttttaaaaatgtttttgactaatccttgtgccatacactttcagtgcttcattaaaatagaagcattgacaatgggcacaatatagttttatattgatatctgtgaatttgaaggagcaaacaactccttaagcttttgttatctggtttcaggaggtaaagatctttttctgttgtgtccctagggtgatgggatgccctctgggtttgtagtgaagaggggttgtagcttggtcacaagactgctcagtctgcactagcatccacctttagatggtttgttaccaagggcttgggtaatcataatttccattttatttttggacagattattctttaagactttgatctgtagggcagacacgagggcagtgtctgcagttggctccatatataatggcccttatatcaggatgtgaatgggtttgcctttcactgagtaccagagaggatttcctcaggtcactgtgtgagtttctacttaagcaaaactggtcatgaactgtggctcagagagctggaactgagtcattaaactacttcagggactacagtaaaaaccaaggcctgtaggcctgtctgcatggctgcaaatgggtgtcttcctccaggtctctgaaagggcaggacctctcttagactgtaactgggaggagtttgggatggttacagagttaacttcagaattctctgttggaccaagttgcgtgggccatttcttggtctgtagccaaaaccaggggtcctgtagtttctcacatgaataagtgcctgtcctctgaaaaaaacactcctcaatcttgggctttagcagagtttcacaactccctccctgggtctcaaagctcttctaaaggcacttacttgggagatgggatcttgtttatcatccgggctggtctggaaatcctggcctgcagcaattctccaacctcagtgtaccatgtagcagtcattacagatgtgagccatgatacctggctgtctcataaaggcatttttttgtcagggatgactgaaaaacttttttgctgtggtgaggataatcaaatagagcaccttttattttttcatgtcactgatgttactgtttctatacatttttactttctattttccatttcaaacttgtctgtaattttagatttggacatttaggacaatatgctagaatttacatgttatgcctgaaataaattagataattgataggcactccatattactagaatggttacttaaatttaagtttgctgcaggtaaaaaggaattataggattttcacccactttcttcagcatatatctaaatgataatttacttgtaaatatttgttttacatatcagaggctctaaccctattttgaaaaatataagttttaatttagcaatgtaatgctgttctttgcttaagttggattacagcagtttcattttgtgtaagaatagcatatatttaaaacataaaaattatcacatttcttttacatgcttattaaaagtttctcattagtatgttctatttataattatactgcatattctgtgaaattttactgccacatagtgcatgccaattattcgaaatacctgccttccatgagtacacaaatattgtagttatccagacaattcttttttaaaggtatattaatgttgcataccagattttatgagtaaacatgtctcttactgttgtgcagttttcatgttagtgttttttcagtgtaggtttcttaacatcagcttattgtgttttttagtttttcttatataattttagccaatttgcagttctgtttgtatactttaagtcaatgtgatgtttaattaagagataaatcagccatacatctatcacaatcggattatatatgtgtgtgtgtttatctataaatatgaccccaatattggttatggcttatcttgtatactttcttagctgattttcagtgggtattttatcttgtctaagcgagtagtcatggaaatactttcattatgtcttattatctccatgtgtctaatgatgaatatatatttcctttgtgtgagagaaacactttttgtgatttgaaggtaatttttgagaagatttgtaatttagtattttttccatttttcctttagaaaaagtaattgttgtaaaaacacataacaggcctggctcggtggctcacgcctgtaatcccagcactttggaggctgaggcaggcagctcacttgagatcaggagttccagaccagcctggtcaacatggtgaaaccctgtctctactaaaaatacaaaaattagctggacatggtggcctacgcctgttgttcgggctacacaggagactgaggcaggagagtcgcttaaacccaggaggcagaggttgcagtgagccgagatcacgccactgcactccagcctgggtgacagagcgagattatgtctcaaaaaaatgagaagaaaaaacagtaaaaacatattaaaatttagcatcttaagtctatttaagtgcacatttcagggccagacgtggtggctcacatctgtaatccctggattttgggaggccaagacaggagtatcatttgagcccagcctgggcaacattcggagattccctctctacaaaaattttttaaaatatccaggcatgttagtgtgcacctgtggtcccagctatttgggagattgaggggaggattacttgagcctgggagtttgaggctgaagtgaggcataattttgccactgcacttcagcttgagtgacagagtgagaccctgtctcaaaaagaagctgtacatttcagtcatgttaaatatattcacattgttatgcaaaagacttctagaaattttacatcttgtgaaactaaaactcagtacccatttaagtaacaagaacccattttaccctctccgcggcccttgacaaacaccgttccactttgtttttatgagtgtgactgcttaagatatctcatatacatagtggaatcatacagtttttatcattttgttatgggcttatttcccatgacataatattttcaaagtttatcttaaaatgtgacaagatttctttgattatatttgatttaattatgataatatttgataatctttgatttctgtgatattggatgtatatgttacattttttatgtgtttgtaaattaagagacaactgggttgcttctgccttttggcttttgtgaatactggtacaataaacatggatgttcgaatttgtgttccaggccctgtgcttcatattttggaaatatattcataagtgagattgctgtatttgatgataattccatttttaattaagaagcatttataacatttaaaataatggttgcatcttgttttctaccaacagtcaacatagttttattttcattgcatcatcaacagatttggtgttttaaaaaaaggtatagtggccattgtaatgagtgtgaggcaattttgttttttcattttatttatttatatatttatttatttatttatttattgtgatgaagtcttactgttatcacccaggctggagtacaatggtgcaatggctcactgcaacctccgcctcctggattccaacaattctcctgcctcagcctcccgagtagctgagattacaggtacctgccatcatgcctggctagtttttgtatttttagtagaaacgggggttttcaccatgttggccaggctggtcttgaactcctaacttcaggtgatcctacctgactcggcctcccaaagtgctgggattacagtcgtgaggtgagcgcccggcctcatttttatttttatatgtttctctgcaaatcattaattctgcttttcttttcaaatgttttatcccatttgggtatattttttgatgaaaattattttttcatttctttcttttttttttttttttgagacggagtctcactctgtctcccagactggggtgcaatcgtgtgatcttggctcactgcaaactctgcctcctgggtttaagtgattctcctgcctcagcctgcctcagccttctcagtagctataggtgcctaccaccatgcctggctgacttttgtatttttagtagagtttcaccatcttggtcaggccagtcttgaactcctgaccttgtgattcacccgcctcggcctctcaaagtgctgggattacctgcgtgagccaccgggcctggccttactttttcatttctaaataaagttattcaactttattgttcagttttaagagttgttcatatactctgaatattaactactttcacttgtgagttccatatattttcacccacttcctagatgacattttcagtctattgaattttttttaatgtgcagaaattctgaagtatagtgtagttaaatatttctgttctttcctttgttgcatatgcatttaatgtcgtatcttaggaaatggtgccaagacccatgtcaagttttttttctaagagattcgctagttttttgtttttttgtttttctgttttttctttttatgtctaagcattttatttgaaatattttttggccaggcgcagtggctcatgcctataatctcagcactttgggagatggaggcgggtgaatcacttgaggtcaggagttggagaccagcctggccaacatggtaaaaccccgtctccactaaaaatacaaaaattagccgggcgtgctagtgcatgcctgtagtcccagctactcgggaggctgaggcaggagaattgtttgaacccggaaggtgtaagttgcagtgagccgagatcatgccactgcactccagccttggtgacagaatgagactccatctcaaaaaaaataaataggccaggcgcggtggcatatgcctgtaattccagcatgttgggaggctaaggcgggagggtcacgtgagggtcaggaggttgagaccagcgtggccaacatatagtgaaaccccatctctactaaaaaatacaaaacttagctggacattgtggcatgtgcctgtagtcccacctacttgggaacctgaggcaggagaatcacttgaatctgggaggcagagatttcagtgagccgaggtcgcaccactgcactccagtctgggcaatagagtgagactccgtcactccaaaaataaataaataaataaaataaaatcgggccgggcacggtggctcacgcttgtaatcccagcactttgggaggccgaggcgggcggatcacgaggtcgggagttcgagaccagcctgaccaacatggtgagacccccatctctactaaaaatacaaaaattagctgggcgtggtggcaggcgcctgtaatcccagctactcaggaggctgagtcaggagaatcacttgaacctgggaggcggatgttgtagtgagccgagatcgtgccactgcactccagcctgggtgacagagcaagactccgtctcaaaaaaaaaaaaaaaacaaatattttttgtatatggttcaaggaaatgattcaactttatcagtgttgttatccagtttatggcattattttttgaaaagattatctcttctctgttgtgtgctcgtggcaaccttgtggaagatcatgtaatcatatacagaaggcttcatttctgggctctccactcttttctttcatctgtttatctgcctttgtgtcagtaccatactgtttttgttattttagcttatttatgtatgtatgtatgtatgttttgagatggagtctagctctgtcaccaggctggagtgcagtggtgcgatctcggctcactgcacctctgcctcccgggttcaagcgattatcctgcctccagctcctaagtggctgggattacaggcacacgctgccacaccccgctaatttttgtattcttagtagagacaggatttcgccatgttggcaaggatggtctcgatcccctgacctcgtgatccacccacctcagcctcccaaagtgctgggcttacagacatgagccacggtacctggcttattttagcttttaatatgttttaaaatttggaagtataatacctctttgttctttttcctgggcgtttggctggttatagttccaaatcaaatttttaaattttagacaagttttctttctttttttttttgagacggaatttcgctcttgttgcccaggctggagtacaatggcgcaatcttggcttaccgcaacctccgcctcccgggttcaagcaattctcctgcctcagcctccggagtagctgggattacaggcatgtgccaccacgcctggctaattttgtatgtttagtagagatggggtttctccatgtaggtcaggctggtcttgaactcctgacctcaggtgatccgcccaccttggcctcccaaaatgctgggattgcaggtgtaagccaccacacccagccatagacaagatttctataatgaaactgtacttttgggatttttaaagagcttatattgaatttgtttcccactgtagtttgtactgacatcttaacaaaattaattttattgaccattgaacaaaaatacgttgaagagtgtcttttatttttattttatttgttttagagacagggttttcttacgttgtccatgctagttttgaacctctgagctcaagcaatcttcctgcccagccttcctaaatgctagtattggaggcatgagccaccgtactcaacccatgtgttttatttttagatattcttggatttgccagttttactttttaatttctagttttattcagttttggtcagaaaacaaagtgtatgattttggtcttcttatttattgtcgttttgagacaggatcatatttatcacccatgctggagtacattgacataaatttgactcactgcaacctcagcctccttgactcaagcgatctttccacctcagcctcctatgtagctgagactacagacatgcactaccatgcctcgctaatttttttggttatttgtagtaatgggtctcactagacagggtctcactgtgttactcaggctggtgtcaatcttctgatcccaagtgatcctcccaccttcatcttccaaattattgggattgtaggtaccaaccacacatccagccagtatttaataagacttgttatgtgtcctaacagaatacatcaggtgcaaataagaacattgtgttgtttcttgcttttaactgaaaagttttgtacctatctgttaagcctagttggtctgtggtatggtttggatgtctatgtcctgcaaacctcatgctgcagtgtaatcctcaatgttagatgtgaaacctggtgggaggtgtttgggtcatggggacaaattcttcatgaatgcctttgtgctatcctggtcatgagaaagttttcactccattaattcaaatgagaactggttcatttaaagaaactgactccttcacctcacgcttgccgtctcttaccatgtgatatgtccagttactctttgtcttccaccatgattgtaagtttcctgagaccctcaccagaagcagatgctgttacacccttcttgtacagtctgctgagctgtgagccaaataaaccttctttctttataagttatacactcaggtattcctctttatgcaaaatagttaatacagtctataatgtctgttttctgttttcttattgatcttttatctgaattttctatttattattgcaaatgatgtcttgatctctacaattatgttgctatgtatttcttgcttcacctttgccaaaatttgctttgtatattttggaaacctcatgttatatatacagacacatatacatataaatagatatgatagttatagattcctggtaaattgacccatttgaccattatgtaatactgtgtttgtcctatgctagtacttgacttaaaatacatccaatataattattaccacctcatccaattgtggttactatttgcatggaatatagttttttttccattctgttactttcaacctatttgacttaatgctaaaatgagtctcttatagacagcaaattgtatgctttttaacttaagccactaagccatcttattttttctttttataaatttatttatttttgagataaagtctcactctgtcaaccaggctggtttgcagtggcatgatcatgactcactgcagcctcaacctcccaaactcagatgatctcatttcagcttcttgagtagctgggttgcaaatatttgccatcccaagcccagatagttttttgtacctttttctgtagatacaattttttgccctgttgtctaggttggtctcaaactcctgagttaaagtgatcagattcctcaacctccaaaagttctgagattacattttttaaataagtagtttaattaatttatatttaaaatgactgcttaaagatataaagttactattaccagtttcattgttgttttttttttaatttaatttaatgtaatttaattttatttcaggatacatgtgcaggatgtgcaggtttgttacataagtaaacgtgtgccatggtggtttgctgcacttattaacccctcacctcggtgataagccctgcatgcattagctatttatcctgattctctccctcccctgcaacaggccccagtgtgtgttgtttccccccatatgtcatgtgttcttattgttcagtttccacttataagtgagaacatgtcgtgtttggttttctgttcctgtgttagtttgctgaaaataatggcttccagctccatctctgtctttgcaaagtacatgatgttgttccttttttatggctgcatagtagtctatggtgcatacgtaccacgttttctttatccagtctgtcacagatgggcatttgggttgatgccatgtctttgctattgtgaattgtgctgcagtgaagatacacatccatgtatctttacagtagaatgatttatattcctttggtatatacccagtataatgggatcgttgggtccaatagtatatctggttctaggtctttgaggaatcgccatactggctttcacaatggttgaactaatttacattcccaccaaaagtataaaagcatttctatttctccatagcctcaccaacatctgttgtttcttggctttttagtaatcaccattttgatggcatgaaatggtatctcattgtagttttgatttgcatttgtttaatgatcactgatgttgagctttttttcatgttttattggccacataaatgtcttcttttgaggcgtgtttcttcttgttctttgcttactttttaatgaggttgtttgttttattcttgtaaatttgtttaagttctttgtagactctggatattagcttttgtcagatggatagattgcaaaaatgttctcccattctgtagattgtctgttcactctgacaatttattttgctgtgcagaagctctttaattagataccatttgtcaatgtttgcttttgttgcaattgcttttgacgctttcctcatgaaatctttgcccatgcctatgtcctgaatggtattgcctaaattttattttagggttcttgtagttttgggtttcaaatttaagttttcaattcatcttgagttaatttttgtataagtgtaagaaagggggtccagtttcagttttctgcctatggctagctagttctcccagcaccatttattaaaagggaatccttttcccatttcttgtttttgtcaggtttttcaaagatcagatggttgtagatatgcagtcttagatttctgagttctctattctgttccattggtctatgtgtctgtttttataacagtaccaggcagctttggttactatagccttctagtatagtttgaagttggatatcatgatgcctccagctttgttctttttgcttaggattctcttggctatatggggtcttttggggtttcatatgaattttaaaatagtttttttctaattctgtgaagaatatcagtagtagtttagtcagaatagcatggaatctataaattactttgagcagtatggccatttttacaatattgattctttctgtctttttgtttgtgtcctctctgattttcttgtgcagcggtttgtagttctccttgaagaggtctatcacttcccttgttagctgtattccttggtactttattctctttgtagcagttgtgaatgggagtttattcatgatttggctgtctgcttgtttatggttggtgtattgaaatgcttgtgatttttgcacattgattttgtatcctgagactttgctgaagttgcttattagatgaagaagcttttgggctgagacaatggggctttctagatctaggatcatgctgtctgcaaacatgtcgtctgcaagcttctgcagacagaagtttgacttcctaattgaatactgcttatttatttctcttgcctgatttcgctggctggaacttccaatactatgttaaataggagtggtgagagggcatccttgtctagtgctagttttcaaggggaatgcttccagtttttgcccttttagtatgatattggctgtgagtttgtcatagatagttcttactattttgatgtatgttccatgaatacctagtttattgagagtttttaacatgaagggatgttgaatttgatcgaaggccttttctgcatctattgagataatcgtgtggtttttgtctttaaatctgtttatgtgatgaattatgtttatcgagttttgtatgttgaactagccttgcatcccaggaataaagctgacttgattgtggtggataagctttttaatgtgttgctagattcagtttgcaagtattttattgagaatgtttgtattaatgtttatcagggatattggcttgaaggtttttttgtttgtttgtttttgttatatctctgccaggtcttgatatcaggatgatgctggcctcatagaatgagttaaggagaggcccctccttttctatcatttggaatagtttcagaagaaatagtactctttgtacctctggtagaatttagctataaattcatctggccctggactttttatggttggtaggctattggctatttgttaccgcctcagtgtcagaacttgttataggtctattcagggattcaacttcttcctgttcagacttgaaaggatggatatgtccagcagtttatccatttcttctagattttccagtttttgtgcacagaggtgtttatagtgttttctgaaagttgtttttatttctatggggtcagtggtgatatcccctttatcattttttattgtctatttcattcatctctctttatagctagtgtctattttattaattttgtcaaaaaaacagctcctggattcattgatttttttttttgaatggtttttttgtgtctctgtgtccttcacttccagtctgaatctggttatttcttgtcttctgctagctttaaggtttgtttgctcttggttttctcgttcttttagttgtgatgttagggtgtccatttgagatctttctggctttttcatttgggtatttagtgctataaatttccccatgaacactgctttagctgtatgccagagattctggtacattgtctcttcattctcattggtttcaaatagtttttttatttctgattttttttttttttttttttttttgagacggagtctcgctctgtcgcccaggctggagtgcagtggcgcgatctcggctcactgcaatctctgcctcccagattcaagtgattctcctgcctcagcctcccaagtagctgggattaccagcacccaccaccatgctgggctaatattatgtatctttagtagacatggtgtgtttcaccatgtttgccaggcttgtctcgaactcctgacctcaggtgatctgcctacctcggcctcccaaagtgctgggattacaggtgtgagccaccatgcccagccaaagcctacagcacccggtattcccaggtggtctcccctccaagtcccagcaaggcccgaccctgcttagcttccgagattgggcacggtcagaagggtgtggctgtggatgccagcctctgatttaattttattatttagccagaagtcattcagtagcaggttgctcaatttccatgtagttgtgtggttttgagtgagtttcttactcgtgagtttttttgttttgtttttgtttgtttgtttgtttgtttgtttgagacagagtgttacactgtcacccaggctggggtgcagtggcatgttatgatttcagttcttttgcatttgctgagaagtgttttacttccaattatgttacaattttttttcttttcttttttcttcttttttttttttgagaccgagtctcgctctgtcacccaggctggagtgcaatggcacaatcttggctcactgtaacctccacctcccaggttcaagcgattctcctgtctcagcctcctgagtagctgggattacaggcacatactgccacgcctggctaattttttttgtatttttagtacagacggggtttctctgtgttccccaggctggatttgaactcttgagttcaggcaatccacccaccttggcctcccaaagtgctagggttacaagcgtgagccaccatgcccagccatatgatcaattttagagtaagtgccatgtggaacttagaagaatgtgtattgtgttgtttgtggctggagagttctgtagatatctgtcaggtccacttgacccacagctgagttcaagccttgttacttttctgtctcaatgatctgtctaatattaacagtggggtgttaaagactctcactattattatgtggaagtctaagtctctttatagttctctaagaatgtgttttatgaatctgggtgctccttgaattgatctctttaccattatgtaacgtacttctttgtcttttttgatctttgttggtttaaagtttgttttgtcagaaactgtgattgcaggctgggctcggtggctcacgcctgtaatcccagcactttgggaggccaaggtggacagatcacaaggtcaggagatcgagaccatcctagctaacacagtgaaacctcgtctactaaaaatacaaaaaattagccaggtgtggtggcgggtgcctgtagtcccagctacttgggaggctgaggcgggagaatgacatgaacccaggagatggagcttgcagtgagctgagatcgcaccactgcactcgaacctaggtgacagagcgagactccatctcaaaaaaaaaaaaaaaagaaactatgattgcaacccctgcttttttttctgcttttatttgctttgtaattttcctccattctttaatttgagcctacatttgtcttttcatgcgaagtgggtctcttgaatacagcacacaaatgggtcatgactctttatccagtttgcccttctatgtctttcaattgaggcattcagcctattacatttaaggctaatattgttatgtttgattttgattctatccaagtggtgctagctgcttattttgcagagtcgttgatgtagttgttttatagcatcattcatctttgtacttcactttgtttttgcagtggctggtaatggtttttttcttcccatatttagtgcttccttaatagctctatctagcaaggcaggcctggtggtcatgtattccttcagcatttgcttctctgaaaagaattttatttttctccagttacaaagacttagtagtgttattttattgttttatttgattcttgtatctttgttcctcattttctctttttctgtctctgtgtcttttttatacttatcttgatatgcttttacttctttcttattttgttttgtgtatctattcagatatattcttggtggtatattaggaattacataatacctctaaaagataaaacagtgtattttaatctggtaaaaaatgaacttcagctggattcataaattttttctcattatatctgccctcaaatttgtcattgatgttgctaatcatatattttatgttgtatatcattaacaaatgtttataatgatttctattcttttacctttcaaattttagagaataattaaaaatgttttttgtgccattattataatgctaagaaattccatttttgtgtatgtgcatgtttccctagaaaataatgtatttatatgataaaattattatttataaaattactttatttaatcgtattattttcagtagaagcaactgctttcagcatcttttatgtttagggcatatgaagtgccaatattttttttcagaatttggttatttttgaaggtttttttctttttattgggcaggactggtattattctcacttgatagctatttttttttaggactttggctatatcacagtttccttctggcctgcaaagcttttgttgacagttcactgactatcttataagactgtgcttgtaaatgacatgccatttttatcttgcagctccattctcttcttgtctgtggtttttgaaattgtgcttatatatgtgtttgttataaatatctttgtgtgtatcctaattgtttgttgagcttcttcattttgacaatattttttctttcagaatttttgagttatattttcttttgatattttttacctttacaatttctgttttttggatattttaaatatttttttcttatcagttttttctggttttctatagttctctgtattcctattttactcattgagtattcaatttatttttaatttttaaaattaatatatacatcttttttatggtttctttctgaaaattttataatatttttgatagaaccattttgccctattttgtattcattgtaatctttgattaaaatttagacattaaataaagctacctgacacagtttttatcttgtagctttctcctggcatagtctgaaaacaattatcttggttagagatcctggtagactctcaaacatgttcttagaatgtatcttgtctaaaattttgtgtttactttttagttaaaggagtttatttctgcttcatcttaatcagtaaccatttgctctgttttctgtctgttgtactgcagtctctctgctgctgtaacaattacctttggtctcaagacccaaactataactccaaaatataccaccatttttttcagcactttatgttacgggagaccagtttctggaaaggcccctagaagcaagtaatatagatgtatgtgccagtattttacttgtttattaaaaaagaaaccaaaagttagcaatttactttgaaaggcagtatgttatattgttgagtaggaagaactgtgttgggcaaaggtaatggacttttctttttcttctgtgtctttgcattcctgtgtactcatctgtgtactcacctggggaactttacatgcttatttataagttttccttatgtattttggtcagtatgcttttattacatttatatgtctatgaaggatttagggcctgtggtattttattatggcatcttgcttatgtagtttgtataatataggttagatttgtaaagtatgtttatcagagtctagtaagttgaataatttgttgtttgtatttctttcagctatgtgttcttcttttaccagagacctttggccagagcaagacataaaagattcttttcaacaagtgatactgagaagacatggcaaatgtgaacatgagaatttacagttaagaaaaggctccgcaaatgtggttgagtgtaaggtgtacaaaaaaggttataatgaactaaaccagtgtttgacaactacccagagcaaaatatttccatgtgataaatatataaaagtctttcataaaattttcaattcaaatagacacaagacaagacatactggagagaaacctttcaaatgtaaaaaatgtgatgaatcattttgcatgcttttacacctacatcaacataaaagaattcatattagagagaattcttaccaatgtgaagaatgtgacaaagtgtttaagcggttctcaacccttactagacacaagagagttcatactggagagaaacccttcaaatgtgaagaatgtggcaaagcttttaagcactcctcaacccttactacacataagatgattcatactggagagaaaccctacagatgtgaagaatgtggcaaagccttctaccattcttcacaccttactacacataaggtaattcatactggagagaagcccttcaaatgtgaagaatgtggtaaagcttttaaccacccttcagcccttactacacataagttcattcatgttaaagaaaaaccctacaaatgtgaagaatgtgacaaagcttttaaccgattctcataccttactaaacataagataattcattctggagagaaatcttacaaatgtgaacaatgtggcaaaggctttaactggtcttcaacccttacaaaacataaaagaattcatactggagagaaaccctacaaatgtgaagaatgtggcaaagcctttaatgtgtcttcacaccttactacacataagatgattcatactggagagaaaccctacaaatgtgaagaatgtggcaaagcctttaaccactcctcaaaacttactatacataagataattcatactggagagaaaccttacaaatgtgaagaatgtggcaaagcttttaaccaatcctcaaaccttaccaaacataagataattcatactggagagaaactctacaaatgtgaagaatgtggcaaagcttttaaccgatcctcaaaccttactacacataagagaattcacactggagagaaaccctacaaatgtgaagaatgtggcaaagctttcaaccgatcctcaaaccttactaaacataacataattcatactggagagaaatcttacaaatgtgaagaatgtggtaaagcctttaaccaatcctcaactcttactaaacataggaaaattcagcagggcatggtggctcatgcctgtaatcccaacactttgagaggactaggtgagcagatcgcgaggtcaggagttcaagaccagcctggccaacatggtaaaaccccatctctactaaaaatacaaaaatttgctgggtgtggtggcaggcgcctgtaatcccagctacttgggaggcagaggcaggagaatcatttgaacctgggaggcagaggttgcagtgagccaagatcgcgccattctactccagcctgggccacaaggcaagactctgtctcaaaaaaaaaaaaaaaaagaaaagaaaattcatactggaacgaaaccctacaattgtgaagaatgtgccagtgctttcaaccagtcctcgaacctttttaagaaaataatttatactggagagaaattctacaaatgtgaagaatatggcaaagcctttaaccagtcttcaactcttactaggcattaaaaattcatactgtacagaaaccctacgagggtgaaaaacatggcaaagcctttaacaagccctcaattcttaacagacataacataattcatactggaaagaaactctgcaaaccagaaagatctggcaatgcttttgacaacacctcaaacttttctaaccataaaagaaattatactggtgagaaatcttagaaatctgaagaatgagacaaagcctttaaatggttgtcacacttgattgtaggtaagataattcatactggagaaaacacctacatgtgtgaacaatgtggcaaaacttaaccagtgctcacaccttattgcacaggaaagcatttgtacttgagataaattatacaaatataaagactgaaaaagccattaatatatgttcatatctcaacaccagatagttcatacttaataaaagcattataagtacaattactgtcaaaagacctttcagaaaatacaagcttttgaccaggcgtggtggctcaggcctataatcccagcactttggtaggccaaggcaggtggatcatgaggtcaggagtttgagaccagcctatccaagatggtgaaaccccatctctactaaaaatacaacaattagccggttgcggtggtggtgcctgtaatcccagctactcaagaggctgaggcaggagaatcacttgaacttggggagggagaggttgcagtgagctgagattgcactctagcctgggccacagagcaagactccatctaaaaagtaaaaaaaaaagaaaatatgaactttacagtgaagaatatttattttgaagatgaatgttacaaatataaagtgggtagtagtgcctttacttgtatcacagatcttattgtagacattttttgtagaggaaaaactctgaagcactttcacactttgttcaatatcagggaatttatattgaagaaaaatcatgcaaatgtagtaaatttggaaaaacactttttcaaaaactacagcttagaaaacagagttcatactagaatatatttttgcagatgcagtaaaagttaaaaaaaatttaatccataagtaagtctgtgtaaatatcagaatttatggtagaaatacataaggcactgacaacatcagatatactaaatcagagggctgagtatagaaaattaaagttggtagaaaaattatttgtatataactttaagaggatcagaaggttttttgcagttataattacattcaaagtatactttatttcttgaaaaatattacagattttttgaaaagtgaataatgatgtcattcaactctgaaattcctgccgtttcttcattcctattggattcacatgtgaaagcatgggatcaattattgctgtatcaaagatatgaaagattctttctttgttttgttctgtttttttgagatggagttttgctctttcgtccaggctggagcacagtggcatgatctcggctcactgcaaccttcaatttccagtttcaagcgattctcctccctcagcctcctgagtagctgggattacaggcgcatatcaccacgcccagctaatttttatgtttctagtacagacaggatttcatcatgttggccaggctggtctcaaactcctcaccttgtgatccacccaccttggcctccaaaggtgctgggattacacaggcatgagccactgctcctggcaagagattcttttttattaggtgggcattatttgtgatcttttctattgaaaagtaaaaacattagaatgtaagatgcataatgaaaatgtaagtggagaggttctttggggttaacttataatattgagtggtgcatgaggttggtgttcagagtaatattctgcattatgaaaaaacatttaattttatttaaaatttagtttatcatactaattgtacttttatataagatgcagtacatttttaaaattttagattgtgtgaagttaatagtttaacatttttaacatgttaaatactattgtgcattcaatgaagcattattataccacaaactttaccctgttccaccttactgaagggtataggtaaaagatggtaacgatatactatttagtaacataatggattaacatctctagtaattttttttgccagtggctttaaaccgcaaataagttaaagaatattgtttctgtaggttaaatttttattttgtttttaatcatttaaatttaattttggtgggtacataatatgagtatatatttatgcacttatatggcatattttagtacaggaatacaatatataatagtagcatcagggttaagtgaggcatccttcacccatagcatttctcctttgttttacaaacaatccaaacctacactttttaaaaattttttgttgttgttgttcttgttgttgttgagacggagtctcgctctgtcgcccaggctggagtgtgcaatctcggctcactgcaagctccacttcccgggttcacgccattttcctgcctcagcctcccaagcagctaggactacaggcgcccaccaccatgcccggctaattttttgtatttttagtagagatggggtttcaccatgttagccaggatggtctcaatctcctgacctcgtgatctggtctcgatctcctgacctcatgatctgcctgccttgacctcccaaagtgctgggattacaggcatgagccaccgtgcccggccactttttataaattttaaaatgtacaattgttatttactatagagttatttttatggtcataatacaaattatatatgagtataaataaaattcatttctaaactattaatattttttccaaattgttatatatttttctttgaacatgtggcctgtctgcctgcaaacatgcagactttttgattcacatagagttaaatatgtattagtctaaagacaaactttaggtgtaagaaaattatggaataagtgtgtgtgtgtgagtatgagtttgtacctattttcagaaaagaacaatatgggaataaaaatcattttaataaggtggctactataaaactaaaaaccttaaaaaatgctgaaagcaaatgtatactttgtgctttgtattgaatttattactgtacaatccatgacttacagttctgaaccttttcatgcaaattctctgtatatacttgcctggtactcatgctagacccatactttttttgtttcttacattttttttgttttatggtttaggaagtattcattatatgagctggtctgtgattataagaatttttatgaaatttagtgcacacaaaataatttttagatgtaattccaaaagtagtgtattaagttacattttatttagtgagagcactccattttgttcttttaaggggagaacaatatataagttttcttttctttagtgattgttcctttcactttttataattgacataagtatatttatttattgagtcaatttgttcaggtaagtactggggggcttcataagtcatgaggatgtttttatatataaatgtagcaaacatacattacagttcttactgtgtaatcgatgctccataataattcacaaatattcctgctggagttagtttgtaatttcaagtcagaaatgaaagatatcagtggtgaagaaataagattgattcttcatatggagtggacattttttccagactataaaactgaatcttgctgaatttaaagagaaattctggccgaggcagatggatcacctgaggttaggagtttcagaccagcctggtgaaacccggtctctactaataaactacaaaaattagctgattgtggtggcatccacctgtagcccagctactcaggaggctgaggcagaagaattgcttgaacccaggaggcgaagattgtggtgagccgagattgtgccattgcactacagcctgggtgacagaatgagactcataaaaaaaaaaataaattctgcttcttttattttctacttctcttcagatttgtttctcgtatgtattttccaactatgtatgcatcacagcccttctttttctgagttatagctacagttttctgactgttctcttcacgccatttcatttcgcctggtattttgtagattttgatgacaaaattctatttttagtgcacttaaaaatggattttaactggtgagttcgcttatcaatataacattcagattagttaattaagataaaagccaggtgtggtggctcacgcctctaatcccagcactttgagaggccgaggcaagtggatcacttgagctcaggagttcgagaccagcctgaccaacatggtgaaaccccgtgtctactacaaatacaaaattagccacatgttgtggcgcatgcctgtaatcccagctactcgggaggctgatgcaggagaatcgcttgaacccaggaggcagaggttgcagtgagccgaaattgcgccattgcactccagcctggacaagagcaaaactctgtctcaaaaaaaaaaaaaaaaaaagattaaaggcgcacactgtccacaggcaagaggattaaattagcattgcatttctttgtttttaaaagaaaaatcttattagattcttatacaaagtgtggcaaatataaaacttgcttgaaaatatggaaattaaatttttaagagagttaatagtaaacgaatttaattttctttttttatttttactttttattttttagagacagagtcttgctctgtctcccaggctagagtacagtggtgtgatcttggctcactgcaagctccgccttccgggttcacgccattctcccgcctcagcctcccgagtagctgggactacaggcgcccgctaccgcacccgtctaatttttttgtatttttagtagagacgggatttcaccatgttagccaggatggtctcaatctcctgacctcgtgatccgcccgcctcgacctcccaaagtggtgggattacaggcatgagccacagtgcccggccacgaatttaattttctatgatataattacagcacaatttacatttccgtgcagaatcttttaagtgtggtggtaaagattgcaaaataataaaatgacctctgaatttaaaatttagaaaaatatgtcttttctatattgattttacaatttggagaaatttctcttattttttatattttttcttttagtgggagaagtttagtctacggtttttatttttagtcaccaagctgtagccaactcctgggtcattttctctgaaaaacatttggagatcatgacaagttttggattaaaacattctgttattttgcatgcaaactagtttactgtgttcacagactggccagtcatgggaccataagcaacacctgcccctttagtggctttcataccattaccaccagtaccagaaactccaggtggcccaagcttaaagtaaaaatcctaaagtacattggcttctcccatgcaatgtgctgggtccaaaccatgctgttaaatatcagagttcctatggttatgactgacaaatgacaataatagccccaaaatacatatttttgatactatttagccaagattaccacaaagatacagtatttgacacattcttattctataacattttgaaaatattttctcttgacagataaaaatgtgtactttttctgtagaacataatattttgaacatgctgttaaatatcagagttcctatgattatgactaaaaaattaaatgacaatagtccccaaactatgtattttcatactatttagccaaagtaatcacaaagacacagtatttgacacattgttattcttttatgtcttaaaaatattttctttcaacttgagaaaatgtgtgctttttctgtagaacatattttgaagtatatatacattgttattatttctaggtaattaatacctcacatagttaacatttttgtggtgagaccacgtcttatcatttttcaaaaatccaaatacattattatgaactatagtcaccatgttgtacaataaatctcttgaacttatttctcctatttgactataattacttattatttgacagactttccaaacccccatttcttctaaataccttggcatctgatggtcaccattttactctatacatcaatgggattaagatttttggaatccatgtataggtgaaatcatgaaatattaatctttctgtgcctggcctatcccaactaatataatgtcctccagcttaatctatgtaatttaaaataatataatttttttcttttttttttttttttttaaggccaggtgtggtgtcttacacctgtaatcccagcactgtgggaagccagggcaggtggattgcttgagcccaggagtttgagaccagcctggtcaacatggaaaatccccgtctctacaaaaaaaaaaaaaaaatctcagctgggcatgggcatggtagtgcatgcctgtaatcccagctactccagaggctgaggcatgagaatcccttgagccagggatgcagaggttgcagtgaactgagattgtgccactgcatccagcctgggtaacagagtgagactccgtctcaagagaaaaggaattttcttattttaaaaataatattctgttgtgtatatctaccacattgtcttcatttactcattagatgttaaactgtttattctgtattttggctattgtgaaaagtgctacaaacagaattgcaaatgtttcttcattctgattttatttgttttggatatatatccagtagtgcaattgctgttatgacatggtagtttaagttttttgagaaatctctattttgtttttcataatggctgtcttcatttacattccaaaccaacagtgtgcaagccttcccttttcttcacatctttaccaacgctttttctttttaataagagtcattctaacaggaacgagttgatatctcctagttttgttttttcttttttggcttgcctttttgtgataattgacattgagcatttttaaatatatcagttggccattatgtatgtattttcttgaaaaatacttatttcagctacttatttttaatagttacttatttttgttgtattgtcatttgagttttgtatatatttttgatattaaccccttgtcacatgtataatttgcaaatattttctccctttttttagttgtcacattctgttcattgtatcagattctgtgcagcagctttttaatttgaagtgatctgactgacttgttcttccttttgtgtcctgggatatttaggttaaatcaaaaaacttgctgcccagaccaatgttatggggctttcactctattttttggtagtagtagtttaagagttttaggccttacatttaagtggctaatttattttgagtttatttttacatatggtgtgagatgagggtctcacttttttttctctgcatgtggacataaagttttctaaacatcatttattgaagatactgttatttcccttaaaaaaaaaagtcacctgtatttaaaatcagttagctgtaaatacactgatatatttctgctctctttttcttctgctccattggcctatatctctgtttttattcaagtgacatactgttttggttaccacagttttgtagtgtatttcaaagtcagggtgataccttcttttgtcttgattgctttggctatttagggtgttttgtggtaacatatgaattttagatatgctttttaaaaatgtctatgaagtatgtcactggtattttgatagaggttgcattatatctgcagatcattttgtgtaatacaaatatttaactattaaaaatgccagttcatgaatgagtaatattattccatttatgtgttacttaatttgtataatgttctttagagtagaatgtaaggtgtttcaactttttggttaaatttacttcaaactatagttaggtagatggaatttttttgaatttcattttgagatagttactaatgtatagaaatgctatgactttttgatgatgtttttgtattttgaaagtttaataaattttgtttgtttattttttgttgttgttgttgtttcaaatggagtctcagtctatcgcccaggctggaatacagtggtgcattttactttgcaagcttttacaccatctcactggagtcagtttgttgttgtttttgttgcttgtcttttgggatactgtagcaggattgataagaaatcagagagactgatggggttgaggaggatatttattatttaggtgcactggcctagtcggattaacatccaaaggactgagccctgaacaaagagttaagttaccctttaagcattttgtgggatggcagggggagatctgtgcagggagaagcatattacagaagcgagaaacaaagacagttattcaattaattgtgacatgcattacataattttttactttccaaggaaaaacatgttttacaacttgagtttatctatctagtgaccttgcagctgcacagctagagaaacagggtcttcaaaatgcctgggaaaggaggagagataagccttgctagccacagaaaaacaggccgttaatttttaaaggactccagctctttctctttctcaggaggaattgggttttcttacatacaactgagtttctgcttacacattctttaatttcttttaatttctgttccaatactatttttttggtcacaaatttttcactttttttttttctttctttgaaacggatctcactctgttgcccaggctggagtgcagtggcgtgatcttggctcactgcaagctctgcctcccagattcacaccattctcctgcctcagcctcctgagtagctgggactgcaggtgcccaccaccacacctggctaattttttgtatttttagtagagactgggtttcactgtgttagccaggatggtctcaatctcctgacctcgtgctctgcctgccttggcctcccgaagtgctgggattacaggcatgagccaccgcatctggcccaatttttttactctttttcttttactatatttatttcactattcttctgcccccttacataatttctatccagggggtagaaattatgtctgtgttttcccctcattatcagcatctgattggctgaccagcaatttgtctccaagaaatgaaagctgggttaggtgaaggcaattttaacagcttttcaaagttagagtacaccagaagattcctcttagccccagggtatccacttgctccctagaaaggatacactccatacttcaggtcatcctaagggagaaaataaaccagaagctgatatccaccggacattcaagctgacataagcatggcagatatctcggtttatccccagatagtactaagcccaggaccagcaaaaaactaaagggtggctgaggacacatcaccccataaattttccaaagcagaactttgacccaaaaacattctgataagatctctgtgcctagagaagataaaacgaaaagagacacagagattttctacaatacaacatcgggggattattatttgctttctcctcatgggaaatatttacaaacagttaatacaacttcttaaaagcaccatttaatgttttaccaaaaaataattaattaaaatatgatataaaaaaagtacactaaaagacaaagaagtgataatgtgaattaggaaggaaaagttggcatttaggaatgccagaagaacctggaaatttagtatcttactgcaagccacagtgaggctggagatatggggcatgggagtttagacttaaaaaccctgcttgggacacaggtgaaaaatgcagcagaaaatcagttccccgtgctgtgtgaaaataattaagtggcaggcaattagactgaggtgtctctagtccctgggttcatactttaaaaaaaactaactcaggtgcattatttttaattactacattcagagaaacaaaattcaggcttcaccaactataaactgcccattaagctctgattacataaccaggaaattttcacctttaatctattgaagtaggaacttaagaaaataacagaataatagcataagtaataatagtaaagattatagtaatagagaaataacaatagctcatagaatgaattgctgtattaaccaaggctaacaagaatttaagtagcccccctgaagttagaagagaatattaactgtctgtcccaggaaacattaaccatatctaccttccacatattttgtaggctctgtaaactcttgtttctttcttccttgcacagctgcaaggtcacaagacagataagcataagctgcaaactaagttttcccagagatgtaagacatgttgcaaaagtgtcacagcagcctttgttctcatttctgtaagcctgcttcctgcttcacacagtgcccacctcaaaatgcttaaaggggactcattttctttgctctgggctcagagtttcaggacatgtgtccgctgtgccagtgtacaccttaaataaacactttccttcactccatttcgtctctccagttccttactttcccacaacagtacaaattaagaaaccacgtaattgtacctaaccaattactaaatttggttttcttcattatgcattttacaaaatgtcaagcgcatccaggtgaagagaccaccaaacaggatttgtgtgagcaacaagcctgtttattcacttgggtgcaagtgggctaagtccagaaagagagtcagcaaagggagataggagcggggcagctttatcgggaacaagtcataatggtagaatgtcataaggtgggttaactagttaaggcaggaactggctgttccacttctttgtgattttttggctgctccagacttcttggctcctgcaggccatctggacatatatgtgcaggtcacaggggttataatggctgagcttcagctgaggcctgacattcctgtctttttatttttaaaatataaagttataagaaaagataaagaaaatataactttttagtgagggtcattggggtaggggtgatatttctcaggactgcttcaagcatgaccagggactgcgtggacaccttaaagaaaattttattatgagttagtccagtaagtttcaggtctagggtgcattttttatgtggctaaagaggtgccagttagcatattttttagcttggaactgccctaagaaaataagttctctaaaaacagtaatcaggcatattagctttaatgtaggtggcgatgagtttttagaccaaggaaggaataatgttttatgtaccaaagctttttgtccccattttccatcatatgaataggattccctgttgttaagccaacgacctattatattactctttttccataggtgtgggtggcaatgtgaatggagaagttcaatagttgtgattgcaaatcctatgcaggagagataataagtaaaataatctttgtttcctggataaagctgaggaagaataaatttttcatgagctaagagccacttgccctgagttggaaagactggtagagcaggttttcagaagaggagtaggtgggggtgatagagtagaaagaaaaatattggccttttggagtgagggctggaatatttgtgggtgtggaggcatttgctatttcttttgctgttctgtcagcataggcatttcctttagcaataagatgagttggtttctggtgtcctttacaatgaatgaccccagccttggctggcaggagagcagccttaaggagagcctttattagagaggcattgataatgtaagagccttgtgtggtgaggaaacctctttcagcccacataacagcatggtggtgcaggatatggaaggcatatttagagccagtataaatattgacgtacagtacctttgcaagagtgagggcccaagttaaggcaatgagttcggctcgctgagagctagtggagtggtgcagagcagtagcctcaatgaaagatgtggaagagactatagcatagcctgcctttgctggtgagtagcaattaggccaagacattttaacaaaattatccactaccctgactattcctggaatacagccgcatctcattgctgcccttcttcccaactcaaagcctgttttgcttcctccccttgtatctctccaccttaatccgcaagtatgggatacctctactccctctttggcaactgaccatgcaccccttaccattccattaaaacctaatcacccttaccccactcaatgccagtatcccatcccacagcaggctttaaagggactgaagcctgttatcactcgcctgctacagcatgggcttctaaagcctacaaattctccttacaattcctctgaattacaattcagaggactatgctgagaactgccatcaataaaccaagtgtgatcagggtgaggaataggaaagatggaaatatggggaaatggagtgaatgccaggtggatcacagacatacagtcatgggggtcaggtgtggtatcaggaataatgtggaaggctggactgaagtccgggccaggaacaagggtaattatgggagactcagtaaagagcaagtatagccaaagaagccagggggcagaaagtatatgcatcaggtgtgaggaagaaaacaaattttgaatgttatgagacttgtggagagtgagttgagcatagtttgtgattttgaggacatcttgagcatagttagtgattttgaggacctctaaaagtattagagtggtggcagtcactgcacacagacatgagggccaggctaaaacagtaaggtcaaattgtttggacaaaaaggctacagggcatggtcccggtccttgtgtaagaattccgaccgcacagccctgcactttggctgtgtatagtgaaaagggttgggatgagtcagggagagccggtgtgggagcagtttttagagctgtttttaaggaatggaaagaagagtggggagaggatttgggatctatggggtcggctgtgttttcctttgtgagtttatataatggttttgttaggatggcaaacccaggtatccaaaggcgaaagtatccaaccatgcctacaaaggaaaggagttgatgctttggtggtggggataggggtctgtgagattaactgaacacagtctgtatgaagagtgcatgtatgttgacaaaggactatgctgagatatgtaacactaggggaagaaatttgaggcttagagggggatagttggtacccctttgagtagagatgttaaagaagtaggatactgttctgatgggaagcttggtaagaggagctgcaaagaagaaggtcgtcaacatattgaatgaggtgagaagcagaggggtggaaagaaactcaatcatgagaaaaggcttggctgaagtaatgagggctgtccctgaagccttgtggcagtacagcccaggtaagctgctgggactgatgggtgtcagggtcagtccaggtaaaagcaaagagaggctgggatgaggggtgcaagggaatagtgaaaagggcatctttaagatcaagaatggaatagtgagctgtggaggaaggtattgaggacaaaagagtgtacgggttgggcaccacagggtggataggcaaaacaatttgataaggcacagatcctgaactaacctgtaagactcgtccggtttttggacaagtaaaatgggggaattgtaaggagaatttgtaggctttagaagcccatgctgtagcaggcgagtgataacaggcttcagtccctttaaagcctgctgtgggatgagatactggcattgagtggggtaagggtgattaggttttaatggaatggtaaggggtgcatggtcagttgccaaagagggagtagaggtatcccatacttgcggattaaggtggagagttacaaggggaggatgcaaaacaggctttgggttgggaagaagggcagcaatgagatgcggctgtattccaggaatagtcagggtagtggataattttgttaaaatgtcttggcctaataagggaactgcgcaggtggggataactaaaaaagagtacataaaagaatgttgtccaagttggcactagagtgggggagtttaaagaggtttagaagcctggctgtcaatacccacaatagttacggaggcaagggaaacaggcccttgaaaagaacgtaatgtggagggggtagcctccatattgactaagaaggggacggacttaccctccactgtaagagttacctgaagcttggcatccatgatggtccggggggcttctgagacgattgagcagcatcagtcttgccaaggagatctgggaaggagtcagccagagagctttgagccagagctccaggggccttagaagtggctgcaatattagttggacagtttgatttccagtggggtcctgctcagatgggacatggcttaggaggaatcctgggctgtgggcagtccttggcccagtagccagttttgcggcacttgaagcaaggtccatgaggaggttttaaaggagtgcccagaggctgcggtttggttgttctgcagtttttgtgtgccaaaggcatggctggagtttgtcttacagcggaggcaagcagttgcagctctgaaagatgttgccacttggctgcctcttgtctattgttgaacaccttgcaggcaagattgattaattcttgttgtggggtttgagggccagattccaatttttgaagctttctttaatgtcaggaggtgactgggtgataaaatgcatattgagaataagatggccttctggcccttcacggtttaggggctgtaaagtgtctaagggtggccgccaaatggcccatgaactgggctgggtttttatatttgatgaaaaagagcctaaatgctaactgatttgagagaggttggataaagaaaaaaggagaattaaccttgactatgccttcagctccagtcatctctctatgaggaaattgttgggcaggttggggagggctagtcacagaatgaaactgtaagctggaccaggtgtgaggggggaggtgatagaaggattatagggtgggggagtggaggctgaggaagaattgcttggcagtggaggagcagcctggggaggagggaaaagttcagatgggtccataggaaaggaggacttaaaggacccagagcttggggtggagactgaaggtacagacaggagagaaagaagaaagatttgagatgagtcatgctgggagcagagactagggagggaccaatgtgtaaagaatgcctggacgtcaggcacttcagaccatttgcccattttttgacaaaacttatctaggtcttgtagaatggagaaatcaaaagtgtcattttctggccatttagagccattttcaagtttgtactggggccaagcagtgttgcagaagaaaataagatgctaggttttaggtcaggtaagagttgaagaggttttgagttttttagaatgcaggttaagagggaagaaggaggaatggagggcagaaggttgcccatagtaaaaaggtaagtttagagaaaagagagggtagagacacagagagagaggggtggtacttgccaccaaggtgaaggatcaaggcaggcatccccgcggtgatcaaacacatctagaatgtgggtgaataatcaggcaggcatccccacagtgattagacaccaagggaagactgtcttcccgagtctgtgaccagcactggagttttgggtccatggataaaacgcgtctcctctgtctctaccagaaagggaaaggaaatgaagggaaaggagagattgaagggtggtgccaaaattgaaaggagaaagaggttgagggatagcaagagaggttggagaagagaataaaaagatgctgcttacccgatttaaaattggtgagatgttttttgggccagtctgaggacccgagtttgtaggtggattttctcatggagcaaaaggcaggaggacaggagattcatttcccaagggaggtcccctgatccgagtcatggcaccaaatgtcaagcacatccaggtgaagagaccaccaaacaggctttgtgtgagcaacaaggctgtttattcacttgggtgcaagtgggctgagtccgaaaagagagtcagcaaagggagataggagaggggcagctctatagggcttgggtagacagtggaaagttacagttaaaagtagttatctattgttagcaggggagggggtcacaaggtgcatggtggagagatcatgggactcattgtccagaagaatcacaggacaatcacagggtcgattgatcagttaaggtggggcaaggaaaagtcacaatggttgaatgttgtaatgttggttaatcagttaaggcaggaactggctgtttcactttctttgtggttttttggctgctacagacttcttggctcctgcaggccatgtggacacatatatgcaggtcacaggggttataatggctgagcttcggctcagatgcctaacacaaaacactttccttcaagcctctcccatagactacaaactacaaaccatagctgtgtgctctacaattctaaaaccactctttaattaaattcttaaatattttggagtgactcccataaagttttaataggcaaaagtaggagctgggaaccccacagaacaaagttcttcccattcctggcactctcatcatttcaaggcttccgggggtcccagcgtcttagctgtggatctataggggaagaagacacagagcaatgaagatgagacctggaactcaagctgcagtgagagacaaaggccccaccaaacctggaagtcgccctgctggctccagctgcatgcctgattggacagttcccagcccagagtcactgattggataacttttgttttgttttgttttgttttgagacggaatctcgctctgtcattcaggctagagtgcagtggcatgatggctcactgcaacctccgcttctcaggttcaagcaattcttctccctcagcctcctgagtagctgggactgcaggcatgagccatggcgtccagcctgtataacgtttaaaaccccaccctctcaggccctgagtgacagaagatatgattaaatgatgggctgcagccctctcaggcagggcttcctccctgaggtgagcttgacccaccccagaggatatttgcattcaaccttgcgtataaggtcatacgcatttgtaaataatatatcatatggcggccaggcacggtggctcatgcctgtaatcccagcactttgggaggtcaaggtgggtggatcacgaggtcaggagttcaagaccagcctggccaacatggtgaaatcccacctctactaaaaatacaaaaattagcctggcatggtgggcagcacctgtggcgcaggtggcacatgtgggctgcaggagccaatctgctactctggaggctgaggtagagaattgcctgaacccgggaggtggaggttgcagtgagcagaaatcatgccactgcactccagcctgggcgacagagtgagactccatttcaaaaaaatatacatggctatacacaaacgaaaataacataataacacatgttttaaaatttcagctttttttggccaagcgtggtggctcatgcttgtaatccaaacactttgggaggctgaggcaggaggatcatgaggtcaggagttccagcccagcctgatcaacatggtgaaaccccgcctctactaaaaaattaactttgggaggccaaggcaggtgaatcacctgaggtcgggagtttgagaccagtctgaccaacatggagaaaccccatctctattaaaaatacaaaattagctgggtgtggtggcacatgcctgtaatcccagctactcgggaggctgaggcaggagaattgcttgaacccccgggaggtggaggttgcagtgagttgagattgtgccattgcactatagcctgggcaacaagagcaaaactccatctcaaaataaattagccaggtgtggtgacgtgcacctgtaatcctagccactcaggaggctgagccagaagaatcacttatacctgggaggcagaggttacagtgagctgagatcatgccactgtactccagcctgggtgacgaagtgggactccatctccatgaaaaaataaaaaaaaaaaaaattcagcttttttaccttcctggtttacagtcctttgagtaggcagcctgagattttaaaaaggaggtaatcctctgaaatagaatgtgagacacatgtgaattttgaattttctagtagccaaactttaaaaagaaacaaagaacgggttgaattgattgtaagaatgtagttaagccaatatatccaaaatatcattttaatgtgtgaggaatatgtaattattaatgaagtatataaatatttgcaactaaatttttgaaaataactgcatattttacctttctagcacattgcagttcagaccaagcacattccaggcacccaggagccacacatggcagctctgatgtcagtggtgtgaagggccagaggggaaggaagggcctctccctactaacatctatcttcagttccgaggttggaacagatagtggccatagaaagagctgaggccagcaggaataaaataaccacaggtaaaccactgctggccacctgttgcccaccttccttttagagatcaggcagttaacaaaggatgatggggccacaggagaaaaaaactctacgtcttcagttctgtccacactcttgaactccaatgtttagatatggagaaaatagattaaaggcatttattttgctatttggccttggccctaattgtctggctgtggttatcggttttcttgagcggtgactgcactcctgtgcactcctggagtgactgcacagaacttcaggcgatctgcctgcctcagcctcctgaagtgctgggattacaggtgtgagccaccacgcccagccaaaatcttctacatataagtgtatgccatgagtgcacacaagaggccttttttaatttctgtcatttgtagagccataagaaaaaaacagcgaacaaagagtgtatgatagcaaagatgtcttgatttttgatcttataaaaaaaaaagtctatctgggccaggtgcggtggctcatgcttgtaatcccagcactttgggaggccgaggtgggtggatcacaaggtcaggagttcgagaccagcctggccaatatggtgaaaccccgactctactaaaaatacaaaaactagctggacatggtggcacacacctgtagtcccagctactcgggaggctgaggcagaagaatcgcttgaacccgggaggtggaggttgcagtgagccaccaccacaccactgcactccagcctggatgagagagcaaggctctgtctcaaaaaaaaaaaaaaaaagctatctatatcaatgttgccatccacttttgagaagaaactttactggttagctttaccttaagatctccaatggatatacaattgcaaatgtttggaggggcccttctgagtcatgagattattaacccaaggttcaaggtcctgaagtcttgctgcagtgtggatggcaagcagactcaatctctgggttatagattataaagagttttactgtcctcagtcagtagaccattaaaagcattctttacctggtgaaaatatgctttgccataatgcactgaagttttgctgcatttaatcatattagacttcagtagcagaagatacatgaggttctattatctggtgcataagacatccaatgactattttataatagtcaacacatttttttcactctcagtgaatctgattgtcatcagtctcaattacaaaaacaatccagtccatttagttagctttgcttaacactattttatcagggctgggtgcagtggctcgctcctgtaatctcagcactttgggaggctgaggcaagtggataacctgaggtcaggaattcaagaccagcctggtaaatatggtgaaacctcgtctctactaaaaatacaaaaattagccaggcatggtggcaagcgcctgtaatcccagccacttgggaggctgaggcaggataatggctgaatccgagaggcggaggttgcagtgagtcgagatggcaccatttgatttatttatacataaatagactgtaacttattattgtaccaaccaccgtgtttttaccaataaaataacatcaagtgttcaagccatgttcaaataaggcaaatcccaagctgtggtcaatctggctgtttctacacctcatgtttattttctgtatgtccctttgctttttctgccataaatctgttttcatcatgtggctgtgctggagtccctctgaccctgttctggattcacaggctgcccaatttgcaaattattctatgctcaaataaactctgttaaatataatttctctaaagtttttttcttttaggctgggcacggtggctcacacctgtaatcccagcactttgggaggccaaggcgggtagatcacgagatcaggagttcaaggccagcctggccaacatggtgaaactccatctctacgaaaaatacaaaaaaaattagctgggcatagtggcgcgcacctgtaatcccagctactcgggagcctgaagcaggagaattgctgaacccaggaggcagaggctgcagtgagcagagattaggccactgcactccaggatgggcaaaagagcaagacttggtctcaaaaaaaaaaaaaaagtttctttctcttaaaagttttcaaatttttttatatgatgaaaaataaataatgtgttgttgggcctcgatttcctaaactcatccctcagctatttccttaaattattctatgtcttttcaaaatgcttcttcaatttcttttctttttttgagacagggtctcactctatcaaccagtcttgattgcagtggtgtaaccaatcatggctcacttcagccttcaccttccaggctcaagcaatcctcctgcctctgccatctaagtagctgggactacaggcatgcaccaccatggctggctaaattttattttattttatttttcatggaaacagcatcttattatgttgcccaggctgcactggaactcctgagctcacgtaattctcccatctcaggctaccaaagtgctaacaatacaggtgtgagccagctagtgcttctgcaatttcttgagatgattattcccaatgataaacagtactgagcacaaatctgaaggaatctggtttcttctgtacaagtgtcactctccaggatttcaagggtctagggcagggcagctactttgtagtgtgatctatggaggtacatgggctttggagtcagacagagttaatcctgagtctcagcccagccacttagtatctgtgggtctttggacaattttcttgatgtgaaagagttctatgaaccacatatggaaaagaggtagattggtactaattgcaaaatggtggcaatttttaatctcttctgtatccatgcccattgccaggtgcttttacaactgtttccatcaagatccagaatctgttttccaaaccctagatctggctggccttattggctcagagtggtagaaacttgtgaacatgacagtgggctagtttggggcccaggctcaaatggtcttgaatgcttctgtttttctttcagaatgctgccatctccctgaataaagccatgttagccagctggaaaataagataccatgggaaggagaagcaaggtgccctgttgacagccccagaactagaagctcacccccagaagcacagctggctagtcaacaagcagctgatgatacgtgtctcaaagagctcagctgagactagaagaacggccccactcagtctagcctaaatggctgaccatctcaattatgaactaataagttttggacgatttgttatgctacaatagctaactaatacatgcaccccgtgcagataggacaccaggattctatgacaggttgattactagttaccttctaacagtgggcaccctataggtactgattttttcccctgatttaaagttgggtgacttgtaagagaatgttgagtaatgcagaaatacacgtagacatgtatgcatgtgattggtgcttatacccacacagtcccacacaccacaggagaaaacagataactacggcctgaccattagggccaaggccaatagcaaaataagttttgcctttaatctgttttctccatatctaaacatttgaggtcaagagtgtggacagatctgaagacacagagttttattatcctgtggccccaacattctttcttcactgtctgatctctggaagaaaatgggcaacaggtggctatcagtggtctccttgtggttattttgttcttgctgccctctgctctttctatggccactatctgttccaccctcagaactgaagggagatgttggtagggagaggcttttccttcacctctggcagaaaaggtttgctggggcccttcacctcccgacatcagagctgcacttcaatgtggaagctttggtcatgtgtggctcctgagtgcctggaatgttcctggtctgaactgcgatgtgctagaaaggtaaaatacagagttagtttcaaagatttagtttcaaatatttatatactttattaataatcacatatttctcacacattaaaatgaaaattttttgatatattgggttaattaaattgttacaatcaattcaacctgttactttttttttttaagtttggttactagaaaatttaaaatttacatatggctcacattttatttcagaaaattacctccgttctaaaatttcagacggcctgctgaaagaccagaagccgggaaggtcataaaatccgaaattttaaaataattgttattatattcttttcatttgtgaataggcatacagtatgttatttataaatgcatgtgactttacacacaaggttaaatacaaattccctctggggtgggcctggctaagctctgggaggaagccctgcctgaaaagacggcagcctaagctgtcactctttcttcactcagcccagcatctgttcgcatcttctgtcactcagggcctgagaaggtggggttttaaacgttatccaatcagcgacgctaggctgggaaccgtccaatcaggcacgcagctggagcggacaggacggcttccgggatgtggcggggcctttgtctctcgccgcagcctgagctccaggtctccccttcgctgctctgtgtcctctgctcctagaggcccaacatctgtggccctgtgacctgcaggtattgggagacccacagctaagacaccgggaccccctgaaagcctagaaatggtgagagtgccgggtcggacatcccgagagaggggaagggctggttgtaaccggtgggaagtggctgtggcgggactcaggcctccccgcagtcagctccacagtctgcgccccgagttctccttgcccagctcggcctcagtcccctccagccataagatggcggctgtgctgacagtcgggaccccaggcgtcctgtctcttcactgcacagtgactgtgccctggcctggagccctctctgggcagctctgcacccgcagcaccgcgtctttcccagattgtgcagggaccacgggagggtcttcaggggacagttctgactcggggtgcgggttcatgaatgggaagagctttgttccgtggagttcccagttcctcttgtcttctgttaaaaatatatgggagtcactataaaaacattaaataatttaatcaaagagtgattcaaaaattgtggagcacccagctgtggtttgtaatttgtgcttcatgggcgggacttgaagaaaagacttttataaaaagcatgatgaagaaaaccaaattcagtaattggttaggtagagttacatagtttcttaatttgtacaataaaggtgaaaatttcctgattatgtaatcagaggttaattggcagtttatagttggttagggctgagttttgtttctctcaatgtagtaatttactgaaaaatgtacgtcagttagatttttttaaagtaggaacccagggactaaagacacctccgtctaattgcctgccttttaattattttcacagtccatggggagctgattttccgctgcatttttcacctgtgtcccaagcagggtcttaagtctaacccccattcctcatttctccagcctccctctggcttgcagtaagatactaaatttccagttccttctggtgtttccaaatgccagcttttcctccctaattcacgttatcgcctatttgtcttttagtgtacttttctataccgtattttaattattttttgacaaagcattaaatgacgcttttcaaaaagttttttaaaagattttttaaaaaaaatatctgtaaatatttcccatgagaagaaagcaaagaataatcccctgatactgtattgttaaaactctctgtgccttttctccttgtatcttctctaggcacagagatcttgtcagaatgtttttcggtcaaggttttcctttggaaactttatggggtgatgtgtcctcagccaccttttagtttttttctggtcgtgggtttcagtgctgtctggggatgaactaagatatccaccgtggttatgtcagctaaagtgcctagtgaatatcagcttctggtttattttcttccataggacgacttgaaatatggagtgtatcctctcaaggaagcaagtggatgccctggggctgagaggaatcttctagtttactcttattttgaaaaggtaacctcttgagacattaaaattgtctacgcccaacccagctttcatttcttggggacacattgctggtcagccagtccgatgctggcactgatgggaaaacacagaaataatgtatgccccctggattgtcttagggggcagaaagataatgaaataaatatagtggaagaaaaatagtgttaaaaagtgaaaaatttgtgacagataaaatagtatcccaaaagaccagaaaaaaacaaaaacaaaaacaaaaaaacctgactctagtgagatggtgtaagaacttgcaaagtaaaatgcacctggagcagtcaccgagaaatactgcagtgtctcctgtatgggtggttcatgagcacataagtgagcaggagtgggtggaagaatctcccaagtgattgaatggcctgacttgaaacatgagtcagacacacatttgttttttaatcagcactgccactccctgggtttgtcaccttgaaaatatttgtttacttattttgacctcacttttttagctgtaaattgcattatattagtagggcttgaaaggtaggaatttttttttttttttgaaacaagtttcactcttgctgcccaggctgcagaaggattgatcttggctcactacaacctctgtctcccaggttcaagcaattctcctacctcagcctcctaagtagctgagattacaggcacacaccaccacacccagctaattttttgtatttttttttagtagagacagggtttcatcatgttggccaggctggtctcgaactcctgacctcagatgatctgcctgcctcagcctcctaaagtgctgggattgcaggcatgagccactgtgcctggcaggtaggaaaatatttacaaagggcataaaagaggtgggttttagaaaaaaaattaatatctaattatgtatcccatttgttaaaaattctcatttacctttttctttcccagagtgagtttacaagtttcctcaggtgtgttttttttatggctgggtgcattcaaacagaattccaaggcttagcttttagaatgctagctaccaaggaaaagaatagggaaaaatctctattcattctggctgtacagaatgaatacatttccatgagataatgtggtagataattggtgagttacatagattcatgaaaacatcagttgctctttttgcagggtgaatttgtgactaaatatctctgttcaaatcctgttatcttgatttctgagtttcatgctacattttatgagatgaaacttggtatcacctagaagtattcccatataactgtttactacatggtttttaatgaaaacaataaaataatagatatgttgtctgaaaggaatggatacttttgcttctcttatttaggtacaaaatgtaagtacctttgagtaattttgctggatttttcaaacacatagtttcgaaaaccaagtgagtaactctaacatggaaattaaagcttgagcccagtgactaagagctaaggctaatattgagcctacaaaaggaggttatgaaaggcccacctatgcggtggctcatgcctgtaatcccagcactttgggaggccaaggtgggtggatcacgaggtcaggagatcgagaccatcctggctaacacggtgaaagcccgtctctactaaaaatacaaaaaaattagccaggcgtagtggtgggcgcctgtagtcccagcttactcgggaggctgaggcaggagaatggcatgaacccgagaggcggagcttacagtgagccaagatcgcgccactgcactccagcctgggcgacagagcgagactccatctcaaaaagaaacaaagaaacaaataaaagcccagctagtttttttctggggatcctcccctgcagatgtcccagtctgctcaacccagccatggaagaagcctttctgctgacacagccctggaaagctggggacccacaggcaaatgcagttaggattaagatgaaaggggactgagaggatcttactgatgatgttgttattgttttgaggcagtttctaggctttggaatatcaaagttagatttatgtaaaaaaaaattccgaaagagtattgcaacaggaagaagtaccaattataaaaactgtaagtattggaaagtttaggctgacaagggctttctttcctagggaggagcaaacaggattagaaagaaggtgggaggggaatggcaaatgaaccgtgaaaaatcagattttagatcagagaatgttttaccatgaagtcagcatgttcttagacgagacataaaataaggttgtatgttgaatcagactgaggatagttcaaagttctggagcctgtgaaaaattttatttagaccactgaagacaaatgcagctgattcttttaattggaaaaataagaaaatgtgcagagttctaccagaaagaggtcccaatccaagccccaaaagagggttcttggattttgctcaagaaaaaattcagggtgagtccatacagtaaagtaaaaggaagtattaagaaaatatcacaaggtcaggagtttgagaccagcctgatcaacatggtgaaaccccgtctctactaaaaacataaaaattagccaggcttggtggtgcacacctgtaatcccagctactcaggagactgaggcaaaagaatcacttgaacccaggaggcagaggttgtagtgagccgagaccgtgccactgcactccagcctgggtgacagagtgacactctgtctgaaaaaaaaaaaaaaaaaagaagaagaaagaaagtaaaggaataaaagaatggcttactccataggcagagcagcccaagggttgctgtttgcacatttttatggttatttcttgattatatgctaaacaagggatggattatttatgcctcccaattttagacaatataggatagcttcctaatgtttccatatttgtaagctgtcatgacacttgtgggagtgtagcagtgagggcaatcagaggtcactctcgtcacatcttggttttggtaggttttatttgacttctttattgcaacctgttttgtccacaaggtctttatgacttgtatcttgtgctgaccttctttcctaccctgttacttagaatgcctaaccatccaggaatgcagcccagtcagtctcagtcctattttacccagcccctattcaaaatagatgtgctctggttcctctgacatctcccccatctttttcacaagggcacacttaatcctgagggttgtagagggatgaagatccattttctgtaactacttcatgctgaataggggtgatgatatttttgcctaactattcagttttcttgaccctgaaacaaaggatcagtgacattttatgtgaagtcaaaaagtattactttcatcttccattagttcagtcccttcagttaattcctgttctgtttgattgtcatgaacattccagttctccatgtatactgaatgttttttctctattctaatgtcacaatttctaaagttatcacaaacttgcatttaagaacatctgttgctgggcacagtggctcctgcctgtaatctcagccctttgggaggccaaggcaggtggattatctgacgtcaggagttcaagaccagcctgatcaacatggtgaaaccctgtctctactaaaaatacaaaaaaaatagctggatgtgctggtggacgcctgtaatcccagcctagttgggaggctgaggcaagagaattactcgaacctgggaggcagaggttgcagtgagctgagattgcatcattacactccagctccagcctgggcaacagagtaagactccatctcaaaagaaaaaaaaaatagaacatctgtcaaagttaactataaatcatcttttgaagagtaccaacacaagatgattgtctggatggcaaagtcttagggcagtcacagtgaaaaaaaaaaaaaaccatgattgacaaggaaatttggttagctctgtgtcatataataattttatgtaacgattgtgattattaatgatgttttaccatgaagtcagcatgttcttagaagagacataaaataaggttgcatgttgactcagactgaggatagttatattatcatattagttacattagtcatattagaattacaggagtttcccttaattttggaacacataccaataacatatttacacaaatatagtccaaaaatagtcaaacatgatttcacagttgacagccttttctgtgtgattttaatactaaatgagccaaatttttactattttatatttgtgtatgatttatgtcaaacccaattcttagtgaattttttttaatttttttttttttgagacagagtctcgccccgttgcctaggctggagtgctatggcaggatctcagctcactggaacctctgcctcctgggttcaagtgattctcctgcctcagcctcttgagtagctggattacaggtgcacaccaccatacctggctaatttttttgtatctttagtagagactggttttcatcatgttggccaggctggtctcgaactcctgaccttgtgatcggcccgccttggcctcccaaagtgctgagattacagacatgagccaccatgcccggcctcttaatgaatctttatagacaaatctatccaattttaatgtttgaccataaggtagtattctcataaaccttttataactcttcacaaagtccttgttgttagagtagatcagtgctttaagagaagtctgtcatttttatctcaatgttcaatttctagaaaaaataatacctatttaactttagtcagtatgttgacacacagaatctcttttgcaattaaattttagcaaatcttccacaatttgtttaaaccttcagttttattctatctaatctaaaacattcctttaaccttttaatctaggcaaaaaaatccacatttccatgtcttcttatataaccttttatcaaaaacatatttcactttctctgaattccttgcatgtaaaactgttttttagtagtcaaaattagatgttacaatgttaactcttagcaacttttacttttgatgaaaaccttggtaagtaaggaattttaattacatactaggagtgaagtctaggacacagacacaagtgtatataaggtctgactccagtgtattaatagttagggggtgtggctaacttgatgtgtcccaggccttacttagctgtaaaacaggcaagttgtacagtgaacagtcatagtggcattttgagaagtcttaatttaagaggcctaatgacctttaaattgtacaacatttcttgcataaatttccttcagtgaattatttcatgacttatacagaccatctacaatatgtttgggctttctgatttgtcctaaacatccctctttttaaataaccagtcattttactttaggataagaatttactatacaacatcttttcttatataaagtctcttttctttataacctttgtatatgtaggggacatggctaattccatatgtctcaaggccttatttagaatctactggcttcaagataggtaaattgaacaatttttaaaagtcaaagagccaatttatgaccttgaaatatttggtaaatctaatatgtgacctatataacttagatcaaatgtttatattttgaagactttttattttcccaatgatctttaaaactgtttttatttccaaaagattacttgtcacatgaactaaaaggtgttacacttttaacttttctgacaaaatatttgatttacgctcttactatttttaaaccaattaatcagagttctttcatatcacacacacaacacatgtaaatacaaagacagaagattcagtagttgtaaggtttttctttgtcaatttctttcttttttttgaaggaaagtttgtattattttaattatttttatgtatagaaaactcaacagtgtacatttaacccagtttagtggcaagttctttagtctttgcctttttgagcttggcgatctgagccacagacttgagacccagggccttccctccccagtgatggcggatctcatcctgtcattgtagttggtcctgatagcttcccccagcttagccaaagcacctttgtcttctgagttaacctgtgtgaagacgacagtggtgcaggtcttcctgtggactagacgtcctagtcttaccttccccttgataatgcagtaagggactccccttttatgacacagggcaggcaagaagacaaccagcttgatgggatccacatcatgcgcaatcaccaccagctgaactttctttttctccaccaaggtggtgacagtgttaattcctgctcgaaggacacgtggtctcttaataaggatgtcccctttgtcagcagctttcttctcggcccgggccaacagcctctgcttctcctcttgctttgtctctggtctgtacttgtaggctagcttaagcagctgagtagctgtttggtggtccaggccctgggtgaactggttaatcacagaaaaacactttcagccgcctatagaggatggctctttgctgctgcaacctgatatagtggggccatttcgggtgaggtcccttttgggctggatgtcctgcccagtgccacaattcttaggccttttctcaaacaggaaattcaccactttcttggcctcctgcttcttcacaacagcaggggttggagccaccttcttcccctaggccttctttccttttggcatcttgggtcgggggaggagagcttctttgtcagtttcttaactggattactagtttcagcgtggagcccagggccaggaaagcatgtcgtttttatggcctaaaaagtaaacagagctggaaaacaaaacagatcctcctaaattaagggtaccatttttaaatcagatcttggatctaaaaaggagagaattagttaatcccaagggaagtcttatttctcagtaggggttggggatacctccatatttcctaggtggtcaagattatgtttctctgatccaaatatgaagaactgagtatttccccataattgccattagccattccaaaagtatagttctcacctagttattacatgccaagtttcttttataatgtgaagtaatttctgataccccccaaagtcaaaaacatcagataacgcattgcaaaacgaacagaaccttagattttgagaaggctctatccaccttcaatttttggagtttcatgaggaaaaagtgtttctcaaaagagggcctgcggcacctcttctgtttttcccaaggtgtcccaggctgttagagcttgaatatctgctgtacttaagctgacttttaaccacagtgctttttttttctttttttttttggaatggagtctcgctctgtcgcccaggctggaatgcagtggcgctcgctatcttggctcactgtaatatctgcctcccaggttcaagtgattctcgtgcctcagcctcctgagttgctgggactacaggcgagtaccaccacaccaggctaattttttgtatttttagtacagatggggtttcaccatgttaaccagaatggttctatctcctgaccttgtgatcagcccaccttggactcctaaagtgctgggattacaggtgtgagccaatgaccacagtgatcagtgctcttttaaaaagtccttttaaatttcttattaccagactttattcaggtcaaacagccaatatctctggcttttgaattttaccaaaagtaacttcacaggtgttctgaaaagaaaattcaaggtggttcctggaggggaagagaatcaacaaatggtaaagctcacccaaatatcaaataagaaagtactcattccctaagccgggaattgaatcctgaacctgggccaccattatgatggtggagaccaagagaaaatactgtcatgtggtcacaaggtggagcttccaaggccatgactgagcacttttctgagccatcttgaacagcagccttaaggggtcctaggcctgcattctatcctaaggtacccctcttaatgacagaagaatacagaaagacaaatttattagctcaaagtacaacagatttgttacagcttaagactaacctcacaaatgcattcccatattaattagaactttacatagaagataaacagtattttttttcaccattcattcaatcagtttgcatagagaggctagaagtctcgtcagaaatttgtacacttttgccagcatgccaggcttctgggttccatttccccgagtggccctagtgatgtggctggctgcaccacagccccgtgggccaagccacaacaaaaagaaaaattatctttttctggccagatcaaaatatatgtgacaacatagaccttagccactcttcttaacaaccaatatgaaactggcaagacttaaacttggccccagttgggccctgtcattgttaattcaacttaataatcaggagttttatcttttggtctctaggcaagatggttactctgagtaatataaaataagaaagagaaaagagagaaaaagcattgtctgtggcagggtaggaaggcaaagagctgaggggtccagagaaagacctactcattgcagcgataataaaaagttcaggtggccgcttcttggtaggaaagagatttttttcccaacagtcccattaacacttaagttttcccttttggacaagaaaaagatccccatgtcccatggtcctgtagatgcctaattctgtcacccatagccatcagcaaagagtgcaagacagattaatccaaaaagaatagcaatgaatgtcccatagtgtcaaaccagttcttagctgagacggattttactgagaggggtctgtaactttctgaatcttaggaaggaatataacctttctaagctcggcctcaaatccaagttcagtcaagcatccttgtcttttattaagaggagcctttaacccactgtgtcttaggagagactctaattctcctaagttgtgcctctaacccaatcccatcctttactcaggcatatgcacaccactcacccaaagtcagccgattggtgcacacagatgattttcctttgggtcagaggtctcttaagtatagtccctttgtggttaccagaaagatgttaccggaaagaagttctgatccagaccccaagagagggttcttagatctcgctcaagaaagaattgagggcgagtccgtaaagtgatagcaagttaatgaagaaagtaagtaaatagaagaatggctttctctataggcagagcagtggctgctagttgcacatttttatggttatttcttgattatatgctaaacaaggggtggaatatttatgcctctcctttttcaactattttaagataacttccagacattgccatggcatttataaactatcatagcactggtgggagtgtagcagagaggacaaccacatgtcactctcatcgccatgttaattttggtgggttttatccagcttctatactgcaaactgtgttatcagccaggtctttatgacctgtatcttatgctgacctcctatctcatcttgtgagttagaatgtctaaccatctgggaattcagcccagtgggtctcagcgttatttttactcagcctctattcaaaatagaggctgctctggttcagtacacctctgacagagtctgtgtctggctatgtgataaataagaaaagagagcaccatctaagtcataatgggaagggtgtttctttccataaactatttctagagaacacaaaggatgaagaattttattaatcacagctatttacccagattatgtatgtgcttcattgttccccacctcttttctttgtcatatacatttcttccatttgacttttcctgggttgtactttttataataaactagtaaacataactacagtgttttgctgagttctgtgagtagcttgatctaattattgaacttgaggaaggctgtgggagtccccattttttttcttttttgagacaaagtttcgctcttgttgtccagtttggagtgcagtgccgtgatcttggctcaccgcaacctctgccttccgagttcaagcgattctcctgcctcagcctccctagtagctgggattacaggcgcccaccaccatgcccgtctaattttgtatttttagtagagacggggtttcttcatgttggtcaggctggtctcaaacgcccgacctcagttgagccacctgccttggcctcccaaagtactgggattacaggcatgagccgccgcacccattgggagtccccaattttttttttattatactttaagttttatggtacatgtgcacaacgtgcaggttagttatatagtatacatgtgccatgttggtgtgctgcacccattaactcgtcatttaacattaggtatatctcctaatgctatccctcccccctccaccccacaacaggccccagtgtgtgatgttccccttcctgtgtccatgtgttctcattgttcaattcccacctgtgagtgagaacatgcggtgtttggttttttgtccttgcgatagtttgctgagaatgatggtttccaacttcatccatgtccctacaaaggacatggactcatcattttttatggctgcatagtattccatggtgtatatgtgccacattttcttaatccagtctatcattgttggacatttggcttggttccaagtctttgctattgtgaatagtgctgcaataaacatatgtgtgcatgtgtctttatagcagcatgatttataaacttttgggtatatacccagtaatgggattgctgggtcaaatggtatttctagttctagatccctgaggaatcgccacactgacttccacaatggttgaactagtttacagtcccaccaacagtgtaaaagtgttcctatttctccacatcctctccagcacctgttgtttcctgactttttaatgatcgccattctaactggtgtgagatggtatctcattgtggttttgatttgcatttctctgatggccagtgatgatgagcattttttcatgtatctgttggctgcataaatgccttcttttgagaagtgtctgttcatatcctttgcccacttgttgatggggttgtttgtttttttcttataaatttgtctgagttcattgctgattctggatattagccctttgtcagatgagtagattgcaaaaattttctcccattctgtaagttgcctgttcactctgatggtggtttcttttgctgtgcagaagctcttgagtttaattagatcccatttgtcaattttggcttttgttgccgttgcttttggtgttttagacatgaagtccttgcccatgcctatgtcctgaatgatattgcctagattttcttctagggtttttatggttttaggtctaacatttaagtctttaatccatcttgaattaatttttgtataaggtgtaaggaaaggatccagtttcagctttctacatatggttagccagttttcccagcaccatttattaaatagggaatcgtttccccatttcttgtttttgtcaggtttgtcaaagatcagatggttgtagatatgcagcattatttctgagggctctgttctgttccattggtctaggtctctgttttggtaccagtaccatgctgttttggttactgtagccttgttgtatagtttgaagtcaggtagcatgatgcctccagctttgttcttttggcttaggattgacttggcaatgtgggctcctttttggttccatatgaactttaaagtagttttttccaattctgtgaagaaagtcattggtagcttgatggggatggcattgaatctataaattaccttgcggagtccccaatttttaaacagtagctcagaagcatagatgagcctatggggtttgtcactggcatctggaatgaggacaatgttgtgggactgagatctgaatcagggtctatgctgactctgggtggtgtcagaattgaaatgttagacactgagttgctgtttgagaattgcttggtgttcagcaaactctacagatttggtggcagaaggaagatatcccagagccctgtcctggtataaaatgagtgtctgcaaatgggaggctcttctctcctgcacacaggctttcacactacctattgtcttgggatcccagggctcctgccaggattgaagaggatgaaaacttcaaggaaaggagctctgatgacagacccccttttcacaaagctgccaccacaggattcccacccacacccaaatatgcccactagacattgatgtatccacacctctcccagcactaggcaccaccctcaggaatttcactatagcattgttgattttagtgtttcttgacaaaaacccacaaaagtgtctacaagtctcctggcatatccccacatgcagacgctgaatctgccacagcaacctgttttccccaccaagctagggttctgggccacctgttcataatctcatctgcctacaggcacacagaaataaatcagagtccagccccacctgggccaccatctgtagaacaaacaactccttgcacctacattgcactcttccccacgcatggattttttttttcttttaacttttctttttggttaaggggtccatgtgcagctttgttatataggtaaaattgtgtcatgggagtttggtgtagattgttttgtcactgaggtactaagcgtaaaaccgaacaggtatttttttctgatcctttttgtcctttcgttctgcattctcaactaggcctcagtgtctgtcgttcccttctttgtgtccatgtgttattattatttagctcttataaatgatagcatgcatttggttttgtttcactttagctttctaaggataatggtctccagcatcatctatgttgctgcaaataacttaatcttgttttttttttttaatggccacataatcttccatgatgtttatgtaccgtactttgttttttattaaatcttctattttatttaattaatttatttggagactgtgtttcactctgtcacaaaggctgaagtgcagtggtgcaatcttgactcacttcagcctcaaccttccaggctcaaggcaccctcttacttcagcccccaaagtagctgggactacatccatgcaccaccatgcccagctaacttctttttctatcttttgtagagatgagttttgccatgttgcccagggtggtcttgaatgcttgagctaaggcaatccacctgcctcggcctcccaaagtgctgagattacaagtgtgaaccacctcacccaaccataccatattattttaatctagtctaccattaataggcagttaggtttgttttgttttatgtctttgtttgtttgtttgagatggagtcttactctgtcacccagactagagtgcagtggtaccgtctcacctcactgcaacctctgcctcctgggttcaagcaattctcctgcttcagcctcccatgtagctgggactgcaggcatgtgccatcacgcccggctaatttttgtatttttagtagagacagagttttgccatgggattattgtatgcagcctattattgactttctaattacagccattctgattggtgtgaggtggtatctcattgtggtctttttttgcttgttttttgcatttctctagtgattagtggtgagcatttgttgcacatgcttgttagccacgtttgtcttcttttgaaaagcatctgttcatgttttttgcctacttttttttctttttttttagacagagtcttgctctgtcccaggctggagtgtagtggtgggaccttggctcactgcaacctctgcctcctaggttcaagctattctcctgcctcagcctcccgagtagctgggattacaggtgtgcgccaccacgcctggctaatttttttggatttttttagtagagacggggtttcaccatgttggccaggtttcaaacccgaccccatgatccgcccgcctcggcctcccaaagtgctgggattacaggcgtgagccaccgcacccggccatttgtctactttttaatgaattttttttttttttttgctctgtattctgctgccttgttctgcgagtctgtttttgtaccaataccgttctgcttttgttaccgtagccctctagtgagtgtggtttgaagtggggtaatgtaatgcctccagctttgttctttttgcttaaaattgccttggcaattcaggctcattttggttccatataaattttaaaatagttattttttagttaacagcgttttggtagtttgatacaaatagcattaaattggtaaatgtctttgggcagtttggccattttaataatattgatcttttctatctgtgagcataacatgtttttttaatttgtttgtgtcatctctgacttttgttgttcttgagacagagtcttgctctgtcacccaggctggagtgcaatggtgcgatctcagcttactgcaacctctgcctccctggttcaagctattctcctgcctcagcttcccaagtagctgggattacagtcacatgccaccatgcctggctaattttttttgtattttaatggagacagggtttcaccatgttggtcaggctggtctcgaactcctgacctcatgatccgcccacctcggcctcccaaagtgctgggatacaggtgtgagctactgggcctggccatctctgacttctttaagcagtattttgtcattcttgttatagagatctttcacctccctggttagctgtattcctagatattccattctttttgtggcagttgtgaatgggattatgtttttgatttggcttttggcttggatgttgttgatgtaaacggatgccattgatttagtaccctgaaactttgctggagttgtttatcagtttaaacagctttttgctgagactgtagggttttgaagatatagaatcttgtcatctggacataaggatagtttgacttcctctcttcttttttggatgtcttttattttaatctttttcctgattgctttggccaggacttccaattctgtgttgaataggagttttgagggaaggcattcttgtcttgtgccagttttcaaggaggaatgcatccagcttgtgtccattcagtatgttggctgtaagtttgtcatagatgactcattattttgaagtatgtaccttcaatgcctagtttgttgagggttttaagcatgaaggatgttaaattatattgaaagtgtttttagcatctattgagataatcttgtgggttttgtctttagttctgtttatgtgatgaataatattcattaattgttgtatgttgaaaaaaccttgcataccagagatacagcctacttgatcacactggattaacttgatgttctcctggatttggtttgccagtattttgttgagaaagttttcttcagtgttcatcaaggatattggactgaagttttctattttttgttttatctctgccaggttttggtatcagaattctatatagaattatgatatatatatatagtatacaaaaagagtatactattctttttgttgttgttgttgttgttggaggcggagtctcactctgttgccaggctggagtgcagtggcgcgatcttggcttaccacaacctccacctcccgagctcaagtgattcgcctgcctcagcctcacgagtagctgggactacaggcctgggccaccacacccaggtaatttttgtatttctcgtaaagacgggttttcaccatgttggccaggatcgtcttgatctcttgacctcatgatctgcccacctcagcctttcaaagtgctgggattacaggcatgagccactgcacctggctgatgctattcttatataatgagttgaaaaggagtcccttttactcagtattttaaaataattttggtagaattgataccagctctttgtacatcaggtagaattcacctgcaaatttgtctggtcctgttctttttttggttattaggctatttattactaattcaattttggaacttgttggcctattcagggattctgttttgttgctgttgttattgttcagtctttggaggatgtatctttgctccaaggttgcagtcctaaacttggcccaaatgaactctctacttatattcatgttgcctcagcctttttttttttttttttaggtagacatattacttagagtatgctagaacagcctctatgaggagatttttcctttgattgtactttacttgatgtaacacccaaggatgcaagccaggttgatcccacctagaatctgcacataacatcttgcttctgcctgggattcacaagacagggccagactttggattgagaatatacagaaaaccaataggaggcattttctgcattgtgagatgtcaacatagacatctgaaaccccgctttgagaatgtggctttttaagctttttagatcttgttcaatgacctgttacagttatgtaagaggctccaggtgtaaatagagtctgatgacagaatctttaagtttaaacaagcatcttaagagtgagagatcaaggccacaaaatatccagagccatgacaaccacaactatacctacgtgtaaaatgtcatgctggagcagagtattcttgtccttcctcttacccaaaagtgaatgaatcaggataggtgatccaggttctggagctccaccagagcagttccattttctatttagaatcagcctgagtctctccatcctggcttatcagtgggccctcagccgtggatcactaagaaccgtctcacaatcacctaggcatctttgagacatttgaggatgtccagggcagaactgtgtcaggctgacaagagtgattaattctgcttctctcagtataagagaaagaagtaatcctgtgttttttactcccttcatataagaggtcactttagttggtaccaagatgagagtttctccagtttcctagtacttaggtgaaagacaaagaggaggtcttgtgactcaaataaactaattgcttccatttcatatggtcattcaaaacatagatgaaccaggtgcggtggatcatgcctgtaatcccagcactttgggaggccaaggtgggtggatcacgaggtcaaaacatcaagactatcctggccaacatggtgaaaccccatctctgctaaaaatacaaaaattagctgggcttggtggcacgtgcctgtaatcccagctactcaggaggctgaggcaggagaatctcttgaacctgggaggtggaggttgcagtgagctgagatcatgccactgaactccagcctggtgacagagcaaagttccatctctaaataaataaataaataaataaataaagcagtcatgatccctaccatccaggaacttttagtctagactagcaactgggtacatggttgaattaagtattgtatggttagtacaatgaatagatgtgtacaaaaaaacttgagctttatttgggccactttttttgtattgttgtgacttctgatatcatctgaagggatatttatggacaggagaattttattattattcgtgtttcttttaccttgctaagaatacatatatatcatctgataaaattatcctagaaaaccttgagagatttgtttaagttgcttattattatatgttataacattgaaagggcagattaaagttacataaactctgggattttagtttctcttaggtaaacttaggaaaaactgaactggaaataccccagtggcatagagaacagaattctacagagggtccagtgcctaacccaggtctgttttgtttgtttgtttgtttgtttgtctaagatggagttttgctcttgttgcgcaggctggagtgcagtggcgcaatctaggctcactacaacctccacctccctggttcaagtgattctcctgcctcatcctcccgagtagctgggattacaggcttgcaccaccatgcctggctaatttttgtatttttagtagagagaaggtttctccatgttggtaagactgatctcgaactcccgacctcaggtgattttcccacctaggcctcccaaagtgttgggattacaggcgtgagccaccgcaccaagcgttcaccccttgttttttgtttttttgttttttgcttttttcagttggagtcttgctcttgtttcccaggctggagtgtagtggtgcaacctcggctcactgcaacctctgtctcccaggttcaagtaattcttgtgcctcagcctcccaagtaactgggattacaggtgcctgtcaccacatccagctaattgtgtgtgtgtgtgtgtgtgtgtgtgtgtgtgtgtgtgtgttttcttgaaatggagtctagctctgtagctcaggctggaatgcagtggcatgatcttggcacactgcaacctccatctatgggagtcaagcgattgtcctgctgcagcctcctgagtagctgggattacaggcacctgccaccatgcccatctaatttttgtatatttagtagagacagggtttcaccatgttggacaggctggttttgaactcctgacctcaggtgccacctgcctcaccctcctgaagtgctgcgattacaggcatgagccactgtacccggcaatttttgtatcttcagtggagacagggtttcaccattttggccaggctggtcttgaactcctgacctcaggcgacttacccacctcagcctcccaaagtgctgggattataggcatgaccaccacacccgaccagattcaccctttttggagcccttatttaggtctggccccaccctggagtcttgcatcacaaagctgatttaaaaagatgagagtttttgctggtgaatcctgctgcctttctagagctggtgctcaaaatttcagaaacccaaaagcaggtaaatgagaaaaataaactgtatattttgggatcctaatttttaagttttgtgttaaaaccagtgcttacagaaatattccatttagcaacttgttttctattcctgcagatccagtagttgctccacaagtaacaaaaaagtaaatataaacacaataaaaatttctctaaactacattaaattctctcattctgtatccctcctatctgtctatatttagcttttattctatacattttatttttaaaaatgacagagaaacagatgaagaaataaaaatgctgaaccctttatctaaatcctgggaattattgaacacttagagtcaacttccagggtgttatgaggattaagtcacataatgtgttattccccacatagtgctctgtaacatactcttgagcagatagtacctgcttaataaacattgcattattacatgtttacatgttgtttttcaaatgcagaattattctgaaattgctgctttctgtttcctctgtaaactttaaagagccagcaaagaatacgaaacgtttggatggagattggttgtctccatttgtaccagaaatatttgtgttgtgacaacagagctgagtgtaagggactctgtgctgtgcccgctttctctaactactgctaataatgaacccaggggtagcaacatcagcattggcaggggacttgtttgaaatacccattcatggactttttccaaacctgcagattcacattacatagattgggaccaaaattcccaagtaatgttggttttttttgagacggagtctcgctctgtcacccaggctgaagtgtaatggcacgatctcgtctcactgcaacctctgccctctgggtttaagcgattctcctgcctcagcctcctgagtagctgggattacaggcatgcaccaccacgccagctaattttttatttttagtagagatgaggtttctccctgtttgtcaggctggtcttgaactccagacctcaggtgatccgccccactctgtgtcccaaagtgctgggattacaggcgtgagtcactgctcctgatcctattaccaagtaatttttaagctcattaaagcttgagaggcagtgcttatcagcccacttctctcattaggattacacggtgaaatcctgactctactaaaaatacaaaaattagctgggtgtggtggtgtgtgtctgtaatcccagctactcaggaggctgaggcaggagaatcgcttgaacctgggaggcggatgttgcagtgagctgagattgcaccattacactcgagcctggtaagagcgtgaaactccatctcaaaaaaaaaaaaaaaattgcagaaatctctttacttgtgccctttccacagtttctatttattgttctgggtggaagcatccatgttgttttaatgaagggcctcatgtgactctaagctgaggccagaatcaaatatgagggcttcaaaatacattcatgagagtgaagtgccacctttgtactaaagggtggtcacagggcccgttcagtttgggtttggtagggacagggcagtgtggtgcatatttccattactgtagcagaatttgctggtgtctgtggcaggggagggcacctgtggacaggaaaagaggaacacttttaatatggcagatcatatttttatttccatggagcagctcattttttcctgaatctcttctgttataaaggagagaaatgcatggactttttggtcttggtccttctgtgtgtgggcgtgacactagtaggtaagcaggtggtgctgatgcttttaagggaattttctcaagatgcaggtgttacttgtccagagaattttatctgaaaaggatttccagagaaggaggagaaagaggaataatggcttcttttcagctaaacatgtctcagatcaagagctgtgtccactctgcctcctggagtgccatgtgtttagtacttggaaaccttctctgcttgtgtttttcctccccagtgagtttgtttcaggtactttaaaaaattcttgtaatagtcaagggtctctaaaaaatatttgtttctggctgggcgcggtggctcatgcctttaatcccaggattttgggaggccgaggcaggtggatcacttgaggttgggcgttcaagaccagcctgaccaagatggataaaccccgtctctactaaaaatacaaaattagacaggcatggtagcacatgcctgtcatcctagctactaggaggctgaggcaggagaatcacttgaacctgggagacggaggttgtggtgagccgagatcacaccattgcacttcaccctgggcaactcaaaaaaaaaaaaaaaaatgttttcctatgcaccagacccttctctacatcatggcttcttatatgcaatgcagaattcctaccatgaatttatgatctgccatattaaaagtgttccttttgtggctgttgaacatgggaagatgtggatactcaagattcctactggggaaaagctggggtccttagtaaagatggagaacatataatgttgtggtttcatctaaacccaggaagttgtgaaaaaattattaagagatacctgctctctagagtgctaaagaaagactacttaaaatcattattaaaattatggaatgcgggagatatcttgacctttgcataaaactgattttttaatggttaaattcagtctataattgactttttgaggggcaatatctcagcagtgatgctgtgttcttctgtgtgcatcagcacatcatagaaatttgttctagtgtagttgatgttaataatttacttggttaaagagctctgtgactttttttcactatagagttaattatttttatctttattattaagtatctttatacagctaatgtgcataaaccatcacaattaatctggtgcctgcccttttttcttaggtttttttgtttttgtttttttttgcatgtgtctgtctttggaaaatgaagacacttgactttgtttacaagccagaaacattgggaaaaacacagtctctttcacttgcctaatgtttgacaaaatagtcttcctgggataaaaacattggcattactagtgacctttttagaattttaaaaactcagactttattccagatcttctgaaaaatataaaaaaatcttcatggcaggatctccagtttatcgtgcacatttaaatttgagaggtaccttctgactcaacatgtttttctttgtctgaaaaatatacacaactcattatgatgtaagtatagcactcaataatgtatatgtttgtgtttgtgtccttaattatatactttatcatccagagaagtatcatatatgcactggtgttgtggatcttaggccattctctgccctcagagtaggagaatacattagaaaatatttctgtgttaaaaattattggataatttcagttattcttataagtcagaatcagttctctttactctctcaattcaccttaattcaaataataaattctgcccatggccacttggtaaatatatgtgtgtctctgtgcttgtgtttttcaggagacattgacatttagggatgtggccatagaattctctctggaggagtgggaatgcctgaaccctgctcagcagaatttatatatgaatgtgatgttagaaaactacaaaaacctggtcttcttgggtgagaataactttcatacacaattcttaatatgccctaaatgtttcatgtctctttttttgtagaatttttttgataatttatgctttgtataaatgagtttctaatcccagttttcaagaaaatcttgatgatttgtccgtgtggaaaagaatttcttcaacgtgtttcatcttgatctgaactttccacattcctgagctgatgtgtatccttcactctagattagtgataattccagaaatttagtggcataaaatatcactgcccatatcttaaaatctatttgccatcaccaatttttgattcaggtagtaaaattaaaaacctacaaatttaaaatattttctaaatagttagagatgtctctctttaatcagtattttcagattaattttattttatttatttatttttttgagatggaatctcaccctgtcacccaggccggagtgcaatggtgcgatcttggctcactgcaacctccaccctgggttcaagcgattctcctgcctcagcctcccaagtagctgggattacaggtgcacacctccacacccagcaaatttttgtattagtagatacagtgtttcaccacgttggccaggctggtctcaaactcctgacctcaggagatctgcccacctcacccttccaaagtgctgggattacaggcgtgagccactgcgcctggctaaaacacttttttttttttttgagatggaagtttgctcttgttgcctaggctggagtgcaatgcactatcttggctcactgccacctccgcctcccgggtccaagcaattctcctccttagcctctggagttgctgggactacaggcacctgccaccatgcccagctaattttgtatttttagtagagatggagtttcaccatgttggacaggttggtctcaaactcctgacctcaggtgatctgtccgtctcggcctcccaaagtgctgagataacaggtgtgagcaactgcgcccagcctttggattaattttctaaaatattctatcacatcctttttactgagcacagtactaggttagtaattagagaatataggcaagattcatgttatttatttttaataaagcaggtgttgctgtctctaagcaagacccagtcacctgtctggagcaagaaaaagagccctggaatatgaagagacatgagatggtggatgaacccccaggtaggtgagagtgaaaaaaaacagatgacacagatgagaggtccaaagcttaaaaaaaaaaaatgtgccagtccttacaatgtgttttgggaagctgtgttataaagcatgtagtttctgggaggcctgaatattttcttaaaattttttcttacatagggacatcttctgtcttatgcttttaaattctctaagaattctacttttccttgggggatcttccttcaagtctacaagagagccaaagcatattgtcatagcatataaaagactgtcatggcatataatctgactgcttttttattgttttgggggacgcacaaatatctgtataattttgaaaaattctttgttaaattattttttagttctctttttgaatcctgtctgaaatatgtgagagtagtgatttctgttccattaggggtttcttgttaatttttttgcatatttcatcctgtttgtattactatagtcttaaaatatagtttgaaattataaattatgatgtccctctgctttgttcttttttctcaagaatgctttggctatttgaaatttattacaatttcttgtaaattttagaattgtattttctattgtgaaaaaaataccactggaattatcatggggagtttattaaatgtatagattactctagataatatggcattttaacaatattctttcaatccaagacatgaattttttttttttttgagacagaatctcactctgtcatcaggctggagtgcagtggcacaatcttggctcactgcaacctccacctcctgtgttcaagcgattctcctgcttcagccttctgagtagctgggactacaggcatgtgccaccacacatagctaattttttgtatttttaatagagttggggtttcaccgtgctgttcagactggtctcaaactcctgaccttgtgatctgcccacctcggcctcccaaagtgctgggattatgggtgtaagccactgtgcctggccaacatgaaatattttaaaatttatttttgtcttctctaatttttttcattgatatatatttcattgtaaagattttttaccttcttcgttatatttgttctcagaaatttattttaatgctattattaataagactgttttcttcctctattgtatcagatagttttaagtgtatggaaccataactttatgttaattttatattttgttaagttactgactgtatttattagtttagacaaatttttcttttttttcttttttgagacacagtctcactgtgttgcctaggctggagtgcaatggcataatctcagctcactgcaacctctgcatcctaggttcaagcgattctcctgcctcagcctcctaagtagttgggattacaggcactcggcaccagcccagctaaatttttttttgcatttttagtaagacggaatttcactctgttggccaggctggtcttgaactcctgaccttgtgatttgcccccctcagcctcccaaaatgctgggattacaggtgtgaaccactgcgcctggctgtttagacaaattttaatgtactgtttatggtttttttatatataagatcatatgatccacaaacagcaactttttacttatttctctttaattccaatggcttttaaaaaatgttcttgactaattcttgtgccacatactttcagtgctaccttaaaatagaagcattgacaatgggcgcaatatagttttatattggtatctgtgaatttgaaggagcaaacaactccttagcttttataaacaggtttcaggaggtaaagatctttttctgttgtgtccctagggtgatggaatgccctctgggtttgtagtgaagaggggttgtagctttgtcacaaggctgctgggtctgcactagagtccacctttagatggcttgtcacaagggcttgggtaattgtaattcccattttatttttggacagattgtatatattctttaagactttgatctgtagggcagataccagggcagatttctgcagttggctccttatataatggccctatcaggatgtgaatgggtttgcctttcactgaataccagagaggatttcttcaggtcactgtgtgggtttctgtttaggaaaaactgatcatgatctgcggctcagagagctggaactgagtcaataaactgcttcagggaccacagtaaaaaccaaggtctgtaaacctgtctgcatggctgcaaataggtgtcttcctccaggtctctggaagggcaggacctctcttagactgtaactgggaggagtttgggatggttacagagttaatttcagaattctctgttggaccaagttgggtggaccatttcttgatctgtagccaaaaccaagggtcctgtaatttcccacacgaataagtgcctgtcctctgaaaaaacactcctcaatcttgggctttagcagagtttcacaactccctccctgcatctcaaagctctcttaaaggcacttactttggagatgggatcttgtttatcatctggtctggaaatccaggcctgcagcaattctccaacctcaatgtaccatgtagctgccattaaagatgtgagccatgatggctggctgtctcatgaaggcattttttgtcagggatgactgaataaatttttttttgtggcgaggataatcaaatagagcaccttctatttttttatgtcactgatgttactctttctatacatttttactttcgattttccatttcaaacttctctgtcattttagattcagacatttaggacaatatgctagaatttacatgttatgcctgaagtaaattagataattggtaggcactccatattactaagatggttacttataaatttaagttcgctgcaggtaaaaaggaattataggattttcacccactttcttcagcatatatctaaatgataacataatttctttcttttcttttcttttcttttttttttcttttcttttcttttctttctttatgagatggagtgtcaatctgtcacccaggctggagtgcagtggcatgatctcagctcactgcaacctgcacctcccaggttatagctattctgctgcctcagcctcctgaatagctgggactacaggcgtgtgccaccacatatagttacttttttgtatttttagtagagtcggggtttcaccatattggccaggctggtctcgaactcctgaccttgtgatccacctgcctcggcctcccagattgctgggattacaggcgtgagccattgtgcccggcccaacataatttatttctaaatatttgttttacatatcagaggctgtaaccctactttgcaaaatatacgtttaaatttagcaatgtaatgctattctttgcttctaaagttgaattacagtggtttcaattttgtgtaagaatagcatatatttaaaacgtaaaatttatcatattttttacatgcttatttaaaaagtttcttattagactattctaattatactgcatattctgtgaaattttactgccatacagtgcatgccaatgattcaaaatacctgccttccctgagtacacagtcaactattgtagttatctagacaattcttttttaatggtactttaatgttgcataccagattttatgagtaaacatgtctcttattacgcagtttcttattagcgttttttcagtataggtttcttaacatcagcttgttgtgttttttagtttttcttatataattttagccaatttgcaattctgtttgtatactttaagtcaatgtgaggtgtaattaagagataagtcagccatacgtctatcacgatcagattatatgtgtgtgtgtttatctataaatatgaccccaatattggttatgacttatctcatatatattctttcttaactgattttcagtggctgttttatcttgtctaagtgagtagtcatgaaaatattttcattatgtcttattttcaccatgtttctaatgatgaatatatatatatatatttttttttttttttttttttttttttagacagagtctcgccttttcgcccaggctggtgtgcagtggcacaatctcggctcacggcaacctccacctcccgggttcaagtgattctcctgcctcagcctcctgagttgctgggactacaggcatctgccaccatgcccggctaattttttgtatttttagtagagatgggatttcaccgtgttagccaggatggtctcaatctcctgacctcgtgatccacctgccttggcctcccaaagttctgggattacaggcatgagccaccgcacctggcctgaatatatattttctttgtgtgagaaaaacatttttgtgatttgaaggatattttgagaagatttataattctgtatttttttctgtttttcctttagaaaaattaattgttgtaaaaacataacaggccagtcacggtggctcatgcctataatcccagcactttgggaggcagaggcaggcagatcacttagggtcaggagctccagaccagcctggccaatatggtgaaaccctgtctctactaaaaatacaaaattagccagacatggtggtgtatgtgtgtaatttgagctatacaggagactgaggcaggagagtcacttaaacccaggagacagaggttgcagtgagccgagatcatgccaccacactccagcctgggtgagagagcgagattccatctcaaaaaaaaaaaaaaagaaagaaaaagaaacaataaaaacacataacataaaatttagcatcttaaatctatttaagtgcacatttcagggccagacatggtggtggctcacgtttgtaatccctggattttgggaagccaacacagcagtatcatttgagccccaaagtttgagactagcctgggcaacatatggagatttcctctctataaaaatttttaaaaatatctaggcatagtgttatgcacctgtggaccccgctatatgggagatttagggaggattacttgagcctaggagtttgaggctgaagtgagacataattgtgccgctgcactttagcttgggtgacaaagtggaccctgtcttaaaaagaagctgtacatttcagggatgttaaatatattcacattgttctgcaaaagacttctagaaatttcacatgttgtgaaactaaaacccaatatccatttaagtgacaagatgccattttaccctctccccagtgcttgacaaacacccttccactttctgtttttatgagtgtgactacttaagctatctcatataagtagaattatatagtattcatcattttgtttctggcttatttcaagtgacataatattttcaaagtttatcttaaaatgtgacaagatttctttgataatatttgatttaattatgaaaacatttgatctttgatttctgtgatatttcattgaatatatatgtttcatttttgatgtgtttataaattaagagacacctgggttgcttctgccttttggcttttgtgagtaagggtacaataaacatggatgttcaaatatgtcttctaggtcctgtgttggatagtttggatatagcttcgtaagagtgggattgctgtatttgataattccattgttaattatttaagaagcatgtataacatttttaaataatggctgcttccttcttttctaccaacaatcagcataggctttattttcattgtatcatcaacagattttgtgttttaaaaaacatgtagtatatttttaaacatatagtatagtggccattgtaatgagattttatttctttattattttttattttttgagatggagtcttgctgttgtcatccaggcctgctgttgtcacccaggcaattggcacgatggctcactgcaacctctgcctcctgggttccataaattctcctgcctcagcctcctgagtagctgaggttacaggtgcccgccaccatgccaggctaatttttatatttttagtagagatggggctttcacagtgttggccaggctggtcttgaactcctgacctcagatgatccgtccacctcgacctgccaaggtgctgggattacatgcgtgagccaccacgcctggcctcatttttatttttatgagtttctctacaaatcattaattttgcttttcttttcaaatggtttttcccatttgaatatcttttttgatgaaaatttagttcaattattttttctttctttggttttttttcttttttttttgggagtctcactctctcacccaggctggagtgcaatggtgcaatctcgacgcactgcaacctctgcctcctgggttcaagcgattctgctgcctcagcctcctgagtagctgggattacaggcgccaaaattactctttgtcttccaccatgattgtaagtttcctgagaccctcaccggaagcagatgctgttacatccttcttgtacagtctgctgaactgtgagccaaataaaccttctttctttgtaagttacacactcaggtattcctctatatgcaaaatagttaatacagtctataatgcctgttttctgttttcttactgatattttatctgaattttctattattgcaaatgatgtcttgatcgccacaattatgttgctatgtatttcttccttcacctttgtcaacgtttgctttatatattttggagcccttatgtcatatgtatgtatacatataaatagatatgatagttacagattcctggtaaattgactcatttgaccgttatataatatcgtgtttgtcctatgctgttacatacaagcatatgtcctatgctgttatatacaagcatattatatacaatataattattaccacctcacccaattgtggttactatttgcatggaatatagattttttcagttctgttactttcaacctatttgactcaatgctaaaatgcctctcttatagacagcaaattgtatactttttaacttaagctactaaggcatcttatttctttttctttttataaatgtatgtatgtatgtatttatgtatgtatttttatttttatttttttgagatggcatctcgctctgtcacccaggctggagagcaatggcatcgatctctgctcactgcaacctccacctcctagattcaagcgatattccttcctcagcctcccaagtagctgggagtacaggtgtagtggctaatttttgtatttttagtagagacggggtttcaccatgttggtcaggctggtcccaatctgacctcgtgatctgcccgccttggcctcccaaagtgctgggattacaggcatgagccgctgcacctggccaatgtatttatttttgagataaagtctcactctgtcatccaggctggtttgcagtggcatgatcacgactcactgcagcctcaacctcccaaactcagatgatctcatttcagtttcttgagtaactgggttgcaaatgtttgccatcccaaaccgagatagttttttgtacttttttctgtagagacagttttttgccctgttgtctaggttggtctcaaactcctgagttaaagtgatcagctcccttggcctcccaaagttctgagattacattatttttattaagtaatttaactaatttttaaaatgactgcttaaagatataaagttactattaccagttttattgttgttctttttttaagtttaatttaatttaattttatgttccaggatacatgtgcaggatgtgcaggtttgttacataagtaaatgtgtgctgtggtggtttgctgcacctattaacctctcacctcggtgataagccctgcatgcattagctatttatcctgattctctccctccccgtgacagaccccagtgtgtgttgtttccctccatatgtccatgtgttcttattgttcaactcccacttaataagtgagaacatatggtgtttggttttctgttcttgtattagtttgctgaaaataatggcttccagctccatctctgtctttgcaaagtacataatcttgttcctttttatggctgcatattagtctatggtgcatatgtaccacattttctttatccagtctgtcatagatgggcatttgggttgatgccatgtctttgctattgtgaatgttgctgcaatgaagatacacatccatgtatcttcataatagaatgatttatattcctttgggtatatacccagtaatgggattgttgggtccaatagtatatctggttctaggtctttgaggaatcgccatactggctttcacaatggttgaactaatttacattcccaccaaaagcgtaacagtatttctatttctccatagcctccccaccatctgttatttcttgattttttaataatcacctttctgactggggtgagatggtacctcattgtggttttgatttccatttctttaatgatcactgatgttgagctccacataaatgtcttcttttgagaagtgtttcttcttgttctttgctcactttttttttttttttttttgagactgagttttgctcttgttgcccaggctggaatgcaatggtgcaaactcagctcactgccacctccgcctcccaagatcaagcgattcttctgcctcagcctcctgagtagctggcattacaggcatgtgccaccatgcctggctaattttttgtatttttagtagaggtggggtttctccattttggtcagggctggtctcaaactcccagtctcaggtgatcctcccacctcggcctcccaaagtgctgggattatagccgtgagccactgtgcccggcctttgttcactttttaatggggttgtgtaattcttgtaaatttgtttaaattctttgtagactctggatattaaccttagtcagatggatagattgcaaaaatgttctcccattctgtagatcgtctgttcactctgatgataatttattttattttatttatttattttttttcagacagagtcctgctctgtcacccaggctggagtgcagtggcacggtcttggctcactgcaacctccacttcccgggttcaagcaattctctgcctcagcttccagagtagctgggattacaggcgcctgccaccatgcccggctaatttttgtatttttagtagagatggggtttcaccatcttagccaggctggtcttgaactcctgaccccatcctcatctaccccctttggcctcccaaagcactgtggttacaggcgtgagccaccacacctggtgataattacttttgctgtgcagtagctctttagtttaattagatcccatttgtcaatgtttgcttttcttgcaattgcttttgacattttcatcatgaaatctttgcccatgcctatgtcctgagtagtattgcctagattttcttcaggggttcttgtagttttgggtttcacatttaagtctttaattcatcttgagttaattttttataggcataagaaagaggtccaatttcaattttctgcatatggctagccagttctcccagcaccatttattaaaagggaatccttttccattgcttgtttttgtcagggttttcaaagatcaaatggttgtagatatgcaatcttatttctcagttctctattctattccattggtctatatgtatgtttttataacagtaccaggcagctttggttactacagctttgtagtatagtttgaagttggatatcatgatgcctccagctttgtgttttttgcctagaattctcttgactaggccaggcacagtggctcacgcctgtaatctcagcattttgggaggctgaggcgggtggatcacttgaggtcaggagtttgagaaaagcctggctaacatagtgaaaccctgtctctactaaaaatacaaaaaattagcctggcatggtggcacattcctgtaatcctagctacttgggaggctgaggcaggagaatcgcttgaacctgggaggcggaggttgcaatgagctgagatcatgccattgcactcctgcctgggtgacagagtgagactctgtctcaaaaaacaaaaagaattatcttggctagatggggtcttttgggttttcatatgagttttaaattttttttttttctaattctgtgaagaatgttagtggtagtttagtcagaatagcatggaatctataaattactttgagcagtatggccatttttacaatattctttctatcttttttatttgtttgtgtcctctctgattttcttgggcagtggtttgtagttctccttgaagaggtccttcacttcccttgttagatttactccttggtactttgttctctttgtagcaattgtgaatgggagtttattcatgatttcgctctctgtttgtttattgttggtgtattgaaatgtttgtgattttggcacattgattttgtatcctgagactttgctgaagctgcttattagatgaagaagcttttgggctgagacaatggggctttctagatctaggatcatgtcatctacaaacagagacagtttgacttcctatttgaatatcacttatttatttctctcgcctgatttccctggccagaacttccaatactatgttaaataggagtggtggggagagggcatcctcatctagtgccagttttcaaggggaatgcttccagcttttgcccttttatatcggctatgggtttgtcatagatcttattattttgatgtatgtttcatgaataccttgtttattgagagtttttaacatgaagggatgttgaatttgttcgaaggccttttccgcatttttgagataatcatgtagtttttgtctttagatctgtttatgtgatgaattacatcgatttttgtatgctgaaccagccttccatcccgggaataaagctgacttgaattacatcaatttttgtatgttgaaccagccttgcatcctgggaataaagctttttgacgtgctgctggattcagtttgccagcattttattgagaatttttgcattgatgtttatcaggaatattgacttgaaggtttgtgtgtgtgtgtgtgtgtgtgtgtgttgttgttgttgttttattttgttatatctctgccaggtcttgatatcagggtgatgctggcctcatagaatgagttaaggagaggcccctccttttccatcatttggaatcgtttcagaagaaatggtaccagatcctctttgtgcctctggtagaattcagctataaatttatctgatcctggactttttttgttggtaggctgttcccgcctcaatttcagaacttgtcattggtctatgcagcgattcaacttcttcctggttcagtcttgaaaggatggatgtgtccaggaatttatccatttcttctagatgttccagtttatgtgcacagaggtgtttatagtattttccgaacattgtttttatttctgtggggtcagtgatgatagcccctttatcattttttattgtttattgcatttttctctcttgttttattagtctagctagcagtctattttattagttttgtcaaaaaaaaccagctcctggattcattgagtttttttgaagggttttttgggtctttatgtcgttcacttccactctgaatctggttatttcttgtcttctgctagcttgaagttttgtttgctcttggttttctcgttcttttagttatgatgttagggtgtccatttaagatctttctagctttttgatgtgagtacttagtgctataaatttccctgttaacactgctttagctgtgttccagagattctgttacattgtctttttttttttttttttgagacggagtctcgctctgaccccaggctggagtgtagtggtgtgatctcggctcactgcaacctccgcctcccaggttcaagcaattctcctgcctcagcttcccatgtagctgggactacaggtgccggccaccaagcaaggctaatttttatatttttagtagagacggggtttcaccatattggtcaggctggtctcgaactcccgacctcaggtgatctgtccgcctcagcctcccaaagtgctgggattacatgtgtgagccaccacgcccggctacattgtctcttcattctcattggtttcaaataattttttgatttctgatttagttgtattatttacccagaaataaagaggagcaagttgttcattcaggaaattcattcaggagtaggttgttcagtttcgttgtagttgcgggattttgagtagctgggattacaggcgcccaccaccacacccagctaattttttgtatttttagtagagatggggtttcactatgttggtcaggctggtcccaaactgtgtcatgactctttatccagcttgcccttctgtgtctttcagttgaggtattcagcctattacatttaaggttagtatttttatgtgtgattttgattctgtccaagtagtgctagctgcttattttgcagagttgttgatgtagttgttttatagcataattgatctttgtacttcagtgtgtttttgcaatggctggtaatggttttttcttcttaaccttagtgcttctttcaggagctctagcaaggcaggcctggtggtgatgtgctccctcagcatttgcttgtctgaaaagaattttatttttctccacttatgcagacttactattgttattttgttaattgttgtatttgcttcttgtatctttgttcctcattttctctttttctgtctttgtgtctttgttgtacttatcttggtatgcttttacttctttctcatttgttttgtgtacttacgcaaacgtattcttggggttaccttggggattatataaaacctctaaaagatacaacaatgtattttaatctggtaaaaaatgaacttcaggccaggtgtcgtggctcacacctatattcccagcactttgggaggccgaggcaggcagatcacaagatcaagagatcgagaccaccctggccaatatggtgaaaccctatctctactaaaaatacaaaaattagctgggcatggtggtgcacacctgtagtcccagctactcgggaggctgaggcaagagaatcacttgaacccaggaggcggatgttgccgtgagctaagattgcaccatccagcctggcgacagagtgagactccatatcaaaagaaaaaaaaaaaaaaaagaacttcagttgcatccaaaaattttttctcattatatctgccttcaaatttgtcattgatgttgctaattgtatattttatgttgtatatttgctaacaaatgtttataatgatttctattcttgtacctttcaaattttagagaataattaatattttttgcactattattataatgctaagaaattccatttttgtgtatgtgcattttttttcccagagaataatgtcttttatatgatgtgttgttttgttgaatcatgttattttcagtagcagcaacggttttcagcatcttttatatgtaaggcatatgaaaagccaatgtactttttcagtatttggttatttttaaaggttttttttctttttacttggaaggacagatatgctgatggtattattctcactttatagctatttttttcaggactttgactatatcacacagtttccttctggcctgcaaagtttttgttgacagttcaccggctatctcataagactatgcttgtaaatgacatgtcgtttttatcttgcagctccattctcttcttgtctgtgactttcgaaattgtgcttatatatgtgtttgttataaatatctttatgtgtatcctagtgtatttgttgagcttcttcattttgacattattttttctttcagaattttttagttatattttcctttacaatttctgtttttggatattttaaatatttttgttattctcattttttctgattttctatagttgtctgtgtccttattttactcattgagtattcaatttattttaaatttttaaaattaatgtatacatcttttttatggtttctttctgaaaatcttataattttggtggagcgattttgccctattttgtattcattgtaatctttgattaatatttggacattaaatatagctacctgtcacattgtttataatgtagctttgtcctggcatagtctgaaaacaattatcttggtttgagatcctgtgagactctcaaacatgttctttgaatgtgtcttgtctaaaattttgtgtttattttttagttaaaggagtttctgtttcatcttaatcagcagtcatttgctgtatctgttccctgtctgtggtactgcagtctctctgttgctgtaacatttacctttggtctcagcagaagtaaactgtaattccaaaatataccaccatttctttcagcactttatgttatgggagaccagtttctggaagggcccctagaagcaagtaatatagatgtatgtgccagtgttttacttgtttattaaaaaagaaacgaaaagttagcaatttactttgaaaggcactatgttgtattgttgagtaggaagaactgtgttgggtaaatgtaacagacttttctttttcttctgtgtctttgcattcctgtgtactcacctgtgtgctcacctggggaactttacacacttgtttataagttgtcctcaaatatattttggtcagtatatttttattagatttatatgtctatgaaggatttagggcctatggtattttattatggcatcttgtttatgtagtttgtataatgtaggttagatttgtaaagtatgtttatcagagtctagtaagttgaataatttgttgtttgtatttctttcagctatgtgttcttattttaccaaagacctttggccagagcaagacataaaagattcttttcaacaagtaatactgagaagatatggcaaatgtgaacatgagaatttacagttaagaaaaggctccgcaagtgtagatgagtataaggtgcacaaagaaggttataatgagctaaaccagtgtttgacaactacccagagcaaaatatttccatgtgataaatatgtgaaagtctttcataaatttttaaatgcaaatagacataagacaagacatactggaaagaaacctttcaaatgtaaaaaatgtggcaaatcattttgcatgcttttacacctaagtcaacataaaagaattcatattagagagaattcttaccaatgtgaagaatgtggcaaagcttttaaatggttctcaacccttactagacacaagagaattcatactggagagaaacccttcaaatgtgaagaatgtggcaaagcttttaagcagtcctcaacccttactacacataagataattcatactggggagaaaccatatagatgtgaagaatgtggcaaagccttcaaccggtcctcacaccttactacacataagataattcatactggagagaagccctacaaatgtgaagaatgtggcaaagcttttaaccagtcttcaacccttagtacacataagttcattcatgctggagagaaaccctacaaatgtgaggaatgtgacaaagcttttaatcgattctcataccttactaaacataagataattcatactggagaaaaatcttacaaatgtgaagaatgtggcaaaggctttaattggtcctcaacccttactaaacataaaagaattcatactggagagaaaccctacaaatgtgaagtgtgtggcaaagcctttaatgagtcctcaaaccttactacacataagatgattcatactggagagaaaccctacaaatgtgaagaatgtggcaaagcttttaaccggtccccacaacttactgcacataagataattcatactggagagaaaccttacaaatgtgaagaatgtggcaaagcttttagccagtcatcaatccttactacacataagagaattcacactggagagaaaccctacaaatgtgaagaatgtggcaaagcttttaaccgatcctcaaatcttactaaacataagataattcatacaggagagaaatcttacaaatgtgaagaatgtggtaaagcctttaaccaatcctcaactcttactaaacataggaaaattcatactagacagaaaccctacaactgtgaagaatgtgacaatacatttaaccagtcctcaaaccttattaaacaaaataattcatactggagagaaactctacaaatgtcaagaatgtgggaaagcctttaagcagtcctcaactcttactaagcattaaatattggccgggtgcggtggcttatgcaaaatggctcccagcattttgggaggctgaggtgggtggatcacaaggtcaagagatcgagaccatcctggccaacatggtgaaaccctgtctctactaaaaatacaaaaattatctgggtgtggtggcacgtgcctgtattcccatctactcgggaggcttaggcaggataatcacttgaacctgggaggtggaagttgcagtgagccaagattgtaccactgcactccagtttggcaacagagtgagactccgtctcaaaaaaaatttatactgtacaaaaaccccacaagtgtgaaaaacatggcaaagcctttaagaagccctcaattcttaacagacataagataatttatactggagagaaactctacaaatcagaaagatgtgactacttttgacaacgcctcaaacttttctaaccataaaagtaattatactggtgagaaatcctagaaatctgaagagtgagataaagcctttaaatggttgtcacacttcattgtaggtaagataattcatactggagaaaacgcctacatgtgtgaacaatatggcaaaacttaatgctcacactttattgctaggaaagcatttatacttgagataaattatacaaatataaagactgtgaaaaagccatcattatctgctcacattttactcaacacagagagttcctgcttaataaaagcattataagtgcaattactgtcaaaagatctttcagaaaatataagcttttttagtgaagagtatttattttgaagttgaacatcacaaatataaaaagggttgtagtgcctttacttgtatcacagatctttttgtagacattttcttctagaggaaaactctgaagcagttgatcaaactttgttcaacatcagggaatttatattgaaaaattgtgcaaatataataaatttggaaaaacaatttttcaaaaactacagcttagaaatcaacagttatactagaatatattttttccagatgcagtaaaagtaaaatatttaatccataattaagtctatgcaaatatcagagaatttatggtagaaatatataaggtactgacacttcagatatactaaatcagagtgctaagtatagaaaatctgaaactaaagttggtagaaaagttatttgtatagaactttaagaggatcagaaggttttttgcagagttataattacattcaaagtatactttatttcttgaaaaatattacagattttttgaaaattgaataatgtcatcattcaactctgaaattatttcctgttgtttcttcattcctattggattcacatgtgaaagcatggggttaattgttgctacatcaaagagagagattcttttgtttgtttgttcgtttgttttttgagactgagtttcactctttcgcccaggctggagtgcattggcatgatctcagctcactacaacctctgccttctggtttcaagcaactcttctgcctcagcatcccaagtagctgggataacaggtgccagccaccatgcccagctaatttgtgtatttctagtagagatggggtttcaccatattggccaagctggtcttgaactcctgacctcatgtgatccgcccgcctcagcctcccaaagtgctgggattacaggcttgagccaccacgcccagcctgtagcatattttaataggagaatacaatatataatagtagcagggttaagtaaggcatccatcatctgtagcatttctcctttgttttacaaacaatccaattctacactttaaaaaaaaatttttaaatgtacaattaaatttttatttaccacagtgttatttttatcgtcataataaaaattatatacgagtataaatgaaattcatttctaaattcttaataaatattttctcatgccaggtgtggtggctcacgtctgtaatcccagcactttgacaggctgagcgagggagtggatcttgaggtcagcagttcgagaccagcatggccaatatggagaaatcccgtctctactaaaaatacaaaaattagccaggcgtggtggcatgtgcctgtaatcccagctactcaggaggctgaggcaggagaatcgcttgaacctgggaggtggaggttgcaatgagccaagatcaccccactgcactccagcctgggcaacagagcgagactccatctcaaaaagtaaaatatattttcaaattttctatatatttttctttgaacatgtggcctgtctgcctgcaaacatatacagacttttagttttgattcatatagagttaaatacatgttagtctaaagacaaatcttaggtgtaagaaaattatggagttaagtatgtgtgtgtgagtatgagtttgtacatattttcagaaggaaagaatgatacgggaacaaaaatcattttaatatggtgactactataaaactaaaaacctaaaaaatgctgaaagcaaatgtatactttttggtttgtattgaatttattactgtacagtctatgacttagagttctgaatcttcccaagcaaattctctgtatatacttgcctggtactcatgctagacccatactttttttgtttcttacattttttttgttttatattttatgaagtattcattatgtgagctggtctgcgattataagaatttttatgaaatttagtgcacacaaaataatctttagatgtaattccaaaagtagtgtattaagttacattttatttagttagagcactccattttgttcttttaagaggagaacaatatataggttttctttagtgatttgttcctttcactttttataattgacataagcatatttattgagtcaatttgttcagctaagtactagggaggcttcattagtcatgaggatgtttttatatataaatgtagcaaacatatattacagttttcactgtgtaatagattatccataataattcataaatattcctgctgaagttagtttgtaacttcaagtcaaagatgaaaaatatcaatggtgaagattgattgttcatatagagaggacattttttttccagactgtaaaactgaatcttgttgaatttaaagagaaattctggcagaggcagatgaatcacctgaggtcaggagtttgagaccagcctgatgaatatggtgaaacccagtctctactaaaactacaaaaatagccaggcatggtggtgggtgcctgtaatcccactcgggaggctgagtcaggagaattgcttgaacccggaggtgaagattggagtaagccaagattgtgccgttgcactacagcctgggcgacagagcgagactccatataaaaaaaaaaaaaaaaaaaaaagagctgggcgtggtggctcacgcctgtaatcccagcactttgggaggccaaggtgggcgaatcacttgaggtcgggagtttgagaccaggtgaccaacatggagaaactccatctctactaaaaaatacaaaattagcccggtgtggtggcgcatgcctgtaatcccagctactcgggagactgaggcaggagaatcgcttgaacacgacaggtggaggttgcagtgtggcgagattgcaccattgcactccagtctgggcgacaagagggaaactccatctgaaaaaaaagagaaattcttttattttctacttctcttcagatttgtcttatgcattttccaactatgtatgcatcacagctattctttttctgagttatagctacagttttcttactgttgtcttcatgccatttcatttcacatggtactttgtagattttgatgaggaagttggtatttttagtgcacacaaaaattggttttaactgtagagtttgcttatcagaacagttaaaaggcagccaggtgtggctcacgcctgtaatcccagcactgagataggccaaggagggtggatcacttgaggtcaggagtttgagaccagcctgaccaacatggtgaaaccctgtgtctactaaaaatacaaatttagccacgcgtggtgacgcacgcctgtaatcccagctactcggaaggccgagggagcagaatcgcttgaacctgggaggtagaggttgcggtgagccgagactgggccactgcacttcagcctgggcaacaagagcgaaattctgtctaaaaaaaaaaaaaaaagataaaaggtgcaatactgtccacaggtaagataattaaattagtcagctttgtttttaaaagaaaaatcttactagattcttatacaaagtgtggcaaatataaaacttgcttgaaaatacagaaattaaatttttaagagagttaatggtaagtaaacaattttaaagttaattttctatgatatacttacagcacaacttatatttccatgcagaatcttttatttttaagtgtgagtgttaaaggttacaaaataatgaaatgacttcagtggatttaaaattttgaaaaataatgtcttttctatattgattttacaatttggagaaatttttcactcattttttatatattttttagtgggagaggtttagtctacagtttttatttttagtcaccaaactgtagccaactcttgggtcattttctctgaaaaacatttggagatcatgacagcgtttggattaaaacatttctgttactttgcatgcaaactagtttactgtgttcacagagtggccagtcatgggaccataagcaacacctgctctttgagtgtctttcataccgttaccatcagcaccagaaactccaggtgccccaagcttaaagtaaaaatcctaaagtacgttggctcctcccatgcaatgtgctgggtccaaaccatgctgttaaatatcagaagtttctatggttatgattaaaaaattaaatgacaataatagccccaaaactatatatttttgatactatttaaccaagattatcacaaagacacagtatttgacacattgttattcttctatgttttataaatattttaatgtgacaggtagaatctgtactttttctgtagaacgtaatattttgaagtatatatatagttaaattattatttctaggtaattaataatttatctcacattggtcagacatgatggctcatgcttgtaatcccagcaatttgggaggccgaggcaggcagatcacatgaggtcaggagttcgggaccagcctggcgaccatggggaaaccctgtctctactaaaaatacaaaataagcagcgtgtggtgacacatgcctgtaatccagctaccctggaggctaaggcaggaaaatggctcaaatctgggaggtggttgttgcagggagccgagattgcaccactgcactccagactgggggacagagtgactatcaaaaaaaaaaaaaactttacctcatatggtgaacatttttgttttgagaccacatgacactgtcatcatttttcaaaaatccaaatacattattatgaactatagtcaccatgttgtgcaataaatctcttgaacttatttcttccatttgactataattatgtattatttcacaaacatgtttccagccttccatttcttataaataacttgcatctgatggtcaccattttactctctacatcaatgggattaagttttttggaatccatgtgtaagtgaaattatgagacactaatctttctgtgccttgcttatcccaactaatacaatgtcctccaacttcatccatgtgattgagaataatagtttttgttttttttttaaggccaggagtggtggctcacacctgtaatcccagctctgggaggccaaggccagtggattgcttgagcccaggagtttgagaccagcctggacaacgtggaaaaaccccatctctactaaaaatacaaaaacaacaaaacaaaaacaaaaaacacctcagctgggtgtggtggtgcaggcctgtaatctcagctactccagaggctgaggcatgagaatcccttgaaccacagatgcagaggttgcagtgaactgagatcatgccactgcactccatcctgggcaacagagtgagactcggtctcaagagggaaaataaggcatttttctcatttaaataataaatagtattccattatgtatatcaaccacattgtctttatttactcattagatgttgaactgtttattctgtattttggctattgtgaaacaagtgctgcaaacagaagtgcaaatgtttctttattcttattttgttttggatatatacccagtagtgcgattgctgtattacctggtagtttttttgataaatctgtattttgtttttcgtaatggctatcctcatttacgttcacaccaacagtgtgcaaggattccgttttcttcacatctttaccaacacttttttctttttcttttaataagagttattctaacaggaatgagttgatatagggattttttttttggcttgtctttttgtgataatagtcaacattgagcatttaaaaatatatccgttggacatatgtatgacttttcttgaaaaatatttatttcagctatttccttttttttttttttctttttgagatggagttttgttcttgttgcccaggctggagtgcaatggcacaatctcggctcactgcaacccttgcctcccggatcaagtgattgtcctgcctcagcctctcaagtagctgggattacaggcaaatgccactgcgcccagctaattttgtatttttagtagagacggggtttttctatattggtcaggctggtctcgaacttctgacctctggtgcccacctcagcctcccaaagtgctgagattacaggcatgagccaccgcgtccggcctattatttttaataattttttattgttgtcattttaaatacacttttgatattaacctcttgtcacatgtataatttgcaaattttttctcccatgttctagttgtcacattctgttgattgtatcagattttgtccagcagctttttaatttgaagtgatctgacttatttttccttttgtgtcctgggatgtttaggttaaatcaaaaaacttgcggccaggcgcagtggctcacacctgtaatcccagcactttgggaggccgaggcaggtggatcacgaggtcagaagttcgagaccagcctgaccaacatggtgaaatcctgtctctactaaaaatacaaatattagccgggcgtggttgcacgtgtctataatctcagctactcaggaggctgaggcaggggaacggcttaaacccagaggcggaggttgtagtgagccaaggtcatgccactgcactccagccttggcaacagaatgaaactctgtctcaaaaaaaaaaaaaaatttgctgcccagaacaatgttatagggcttttgctctatattttggcagtagtagtttcagagtgtcaggccttacatttaagtactaatttatttcgagtttatttttacatatggtgtgagatgagggtctcaatttttatctctgcatgtggatataaagttttcttaattgaagattctgttctttccctttaaagtcacctgtatttaaaatcaactgtaaatacatggatatatttctgctgtttttttcttctgctccattgacctatgtctctgtttttattcaagtaccatactgttggttaccatagctatgtagtgtatttcaaagttagtcacttcttttgtcttgattgctttggctattcagggtcttttgtgataccatatgaattttagatatacttttaaaacttttctatgaagtatatcacgtatttcgatagaggttgcattatacctgtaggtcattttgtgtaatacaaatattaatgtcagttcatgaatagtccatttatgtattaatttctatttagaatgtaaggcgtttcaactttttggttaaatttatttcaaactatagttattgtagatgtaattgtttttgaatttcattttgggatagttattaatgtagagaaatgctgtgactttttgatggtgcttttgtattttgaaagtttaataaattttgtttatttatttatttattttgagatggagtctcggtctgtcacgcaggctcgagtgcagtggcacgatcttggctcactgcaacctctgcctccctggctgaagcggttctcctgcctcagcttcctaagtagctgaaactacaggcgcctcctactacacccagctaatttttttatttctatagagatggggtttccctacgttggccagactggtcttgaactcctgaccttgtgatccgcccacctcggcctcccaaagtgctggaattacaggcaggagtcactgcaccttgcctgtttataatttttaagatttactaaggtcttaggcttttttatacttcagattatgtatagggataaaagaaaattatacaggaataattccttttcctcaatttggatgcctttgatttttttctctaatttctttgtcttggatatttagtaccatgtttagtaagtctgactagagtgggcatccttgccttgttctagctcttagagtaaaagcttacaacatatccctgtttagtatgttgttagcagtttttttggttatatatggcatttattggctgaagtgcatttgttctatacctaattttttcagcgatttatcataagggaatgtcaaattctgtcaaacttctattgtgcatccatttttttctctttgcactctgcatatatttaagttttagagatgtgaaatcacaactaattctgcatacatacaaaaaaagtcagagactactatgaacatctctatgcctgcaaaatagaaaatttggagaaaataaataaactcctggaaacatacaactttccaggattaaaccaggaaggaacagaactcttgaacagggcaaaaatgtataaaatatataatgaaattgaattaataatttaaaaaacctaccaactataaggagccctggattatataaaatcacagccgaattttaacacatatacagagatgagctggtattacttctactgaatgtattactgaatgtattccaaaaaatccaggtggagttccaccctaactcattatataaaatctgtatcgctgcacgaggtggctcacgcctgtaatcccagcactttggaaggccgaggtgggcgggtcacctgaggtcgggagtttgagaccagcctgcccaacgtggtgaaaccccatctctgctaaaatacaaaattagccaggcgtggtggcatatgtctgtaatcccagctactcgggaggctgaggcaggaaaatcgcttgaacccgggaggtggaggttgcagtgagccgagatcgcgccattgcactccagcctaggcaatgagtgaaactccatctcaaaataaattaattaataaaataaaaacctgtgtcatcttgataccgaagtctagtgaagacaacaacaacaaaactataggccaatattttgggtgaacattgaaacaaaaatcctccatgaaataatagcaagctgagttcacaggcaaatcaaaaagttattttgccacacttgtgaactttatatcacatgtgcaaggatgtttcatcatatacaagtcaataagtgtgtttcaccatacaattaaaagcaaaaatttatatgattaacacaatagatgcagaaaaagcattcaagaaaatccagtattcatttatgaaaatattctctaagcaatgatgaaacatacctcacaataataagagccatctatgacaaatcctcagctaacatactgaacagacaaaaggggcatgcatttctcattagaaaaaaaataagactatctaaacaattctatttaacatagttctggaagtgctggataaatctaacaaaatgaaaaaataaatggcatccaaataggaaaagaagaagtgaaattaccttcactcatgatataattctctacctagaaaactttaaggattttaccaaaagactcctaaggttaaaaatgacttcagcaaagtctcaggatacaaaattgatatacaaaaatgaatagcattgccttacaccaataacattcaagctgagaacaaaatcaagaacagttttctttacaatagccataaacaaaaaataatatacttagaaatacatcaaaccagggaggtaaaatatctctacaagaactagaaaacattactgaaagtaatcagagacaattcaaataaaaaagctttctatgctcatggatttgaagaatgaatagaaaatgtctatgctgcctagagcagcctacaaaataagtttttgtttttttatcaaaatgtcgattactttttttttttttttgagacagtgttgctctgtggcctaggctggagtgcagtggtgcgatcttggctcactgtaacctccacctcctgggttcaagtgagtctcctacctcagcctcccaagtagctgggattacaggtgcccaccagcacacctggctaatttttatgtttttagtagagatcgagttttgctgtgttggccaggctggtctcaaactcccggcgtcccaaagtgctgggattacaggtgcgacccaccatgcctggcccaaccccatattatttctggtaacaaagcacagaaacatgatttctcgaattttgctaggattttaatttacaaaagaaaggtgaatgccattaaaaggtgtttaatacactcccaccagaaacaagaggcaaggcaggccctgggggcctcacaaaggcggtcttatgcaagggtgagaaagcagagttatcagggaggtgggactattgctttatgaacgtgatgattggaagcaaaaacgtggggctttttcctattgaatacaaagtaaaataatgaatgctggtgtcagtggttgggaataacaacatttgcaggctcatgagagctgcctgacaaaaagcgtgtaaacaacagtgattgctcctgtggccctgtgattcagcaggtttatggagcagttaagaatcgcagatgtcaaatggccaacacagaatctaacgacatgcttaatacaaattattattagtagaaatgctgaattgcttcatttctgcaatttctgctgcttcttaagatgcttttaatgaataaaatctgccttaaaatttgatacctggtaacttctctctgtgagttttgaattggctgatgtaaccaaaatgccagctcttgccatctaactaccattaaaaggaacttctaaagctccgaagtggtcaacagtttcacttccaacttttttaaaagatacacaattttctaaaaaatttttctttatgggcgattgaatagttgggctttggctaattcctcattagcaatagaattatgtatattttgcaaactctaatacagaacacttaatgtatcagacaaccatgattatgatgtatatacctggtataaacaatcttttttgcatattgaattctgcatttttttcttccttgatacgtatgagattcaccagtaccagtttttctcttgtggtggcatatagttgattgtcatttgcattatctattaaaaacctgtggcagctcatggtattattgaccatatgttctagtgtcttcttgcagatttaaatattttattgcagtgtaaagtttaatatttagatgtgtgatacatctttggataatctgtaattaaattgatcttttgtaatggtgatagtgattagcacacactgaaaatccagcaaagcaattatttttctctttttaactggaaatcatattcgtaagttgtggtagatattatcatcagtgtattcatgattcgatttatattttgtgttatctggttataaattttatatagcattcaatttgacaaaatataaatctatttgatttgaatttaatggtgtgtgtgtgtgtgtgtgtgtgtgtgtgtacttccttgaactttaggaaattctacaaatcttatacagatatgaatgtatcaggcttatattttttgcaaggctatatatacatttcttctgtttattaaaatactggaattggtgttatgtagatatagttgtagatatcagaataaaaatggaatgttgtgaaaattacaacttaataaatatttatggcaaataaatacaagataaaaattatacatctttacaagatagttatttacaattgcttagagcttacctgtccagccaaggcctatcttcttcaagactgtgctgaggcctggcacggtggctaatgcctgtaatcccagcactttgggagaccaaggcaggtggatcacctgaggtcaggagttccagatcagcctggccaacatggcgaaacccagtctctactaaaataaataaataaataaataaattagccaggcatggtggtgtgtgcctgtaatcccagctacccagaaggctgaggcaggagaatcactggaacccagaggacagaggctgcagtgagccaagattgcaccactgcactttagcctgggtgacagagcaagactatgtctcaaaaacaataataaaaagattgtgctgaaattgcacctgcttggttacagtctctactggggagaaataaccctgaccgagaatgatcaaaaaaagaataaatttttggcagaaaaattctctgtgtaaaaaaacagagttgtgtaaaagaaaattatgttcagagaaaaacaaactgaccaattttaccacagttatttttaagaaaataaatgcttcaaagtcaaattaaatttatttaaaaattgcaaatatagtggtgaatgaaattaaaggtctcggtcttcacagagtttacattgtaaggtttgaaaaataaagacaatttgagaataaataattcttcatataatgctggtagcataggtaagttggtactacatcctggaagagggctccccaatgcctatacaagctgaagatacaaatacactttagttatatttgtggttaaatatctacatagttacaaaaatttttcttttaaaaatgcacaagactgtttacagaagcactgaccaatctggaaaatcaccaaaatgttcataaaaagtggaataaagaaattgtagtgtatttatataatggaacattgtagatcaatgaatatagaaagcacaacttgcaatattcacaactttcaaagcaaagcacaactacaggcagcaacagagatctatctcacaaacaatgttgagcagaataagctagccaaaaatgagaatttactgtattaatccatttatttaaagttcaaaaacaggcaaaactcatttattgtataaatagctagaatataagttgctcttagaggaacagtgattgaaaaggagaataaaatgtagcgggatttttaaggaatcagagagaccgatggggtacaggaggatatttattaattatttaggtgcaccggcccagtcagattaacatctgatggactgagccctaaacaaagagttaagttaccttttaagcattttgtggggcaaggggagatctgtgcatggagaagcgtactacagaagcaagaaacaaagacagttattcaattgagacatgcattacatcatttcttacttttcaaggagaaacatgttttgcaacttgagtttatctgtctagtgaccttgcagctgcacagctagggaaagagagtcttcacaatgcttgggaaaggagaagagataaggctcactagccacagaaaaacaggcagttaattcttaaaggactccagctctttctctttctctgagggaaatgggttttgttacatacaactgagtttctgcttatacactctaatttcttttaattcctgttccgttccccactttggtgcatttttataacagaggtgttaatagaaagcaccactatttgccaccttctcacagagctgagctgctccttctggtagcggctgatattttgttaataccatcaactgcacggtagtgtgtcgggttactattgcctctatagttgactgaatactcataataaacaggggtaaaaggcaagggaggatgaggcagacgccaagaataagcaagaacccaccaatgaggattttgaatcctccaaaggttgagaaccatcctccaaacaaggaatctggggaccatccagaccaagtctgaactggaacatgggccagcctgcgcattgtagctatgatttccatgaccgcttggtcattatcatcaatttctaggcaacagttggttcaattaaattttccacatactcctccttctgaggctaagaggtaatctaaagccaatctattatgatatatagcatttctcatttgttttgcttgtattgccaataaatctagtgcccttgatgtttcattggttataatttctaggactgcctgcaaccttatgatgaggttgagcatatagattgggttgtggtacccctgtgacccatcttgcgcccaggtagctggcccataatatttcgtgattcaggccattcattttctttccagtttcctatgtccacatcgtttttgatatttgtgtctatttttgtgattatgcttcttctagttcttcctttatttttatcataaactggatatcctaagagttcctgttgctttagaggaattagaaggatggcttgactgttcctaacacacatgcccctgtccatttagctagcagtagctgatatgcctgtgctccacagatccaatacaggccagagggtgcctttcaagcatttgcagcctctagctgatgccaagagtggcttatagtagacaatcaagagaaagggtttggatctggtaagtaggagtcagtctgggtgtttcttcatagttttgtttttagtctcatcataatactgttgccctaggcaggttgtttctcctactgcctctgtgaaagcctttccccattgagcgatacaataccttccaattatggaggtttttaacaaccagacactggcaaaggctgttggttcactggcagggttaagcgaagtgaagttatcttatggtattaattattttgcctcccatggccactagtcccccatattatttcctccacatacacagcatgaggaaattcctaagctgccagctatgttttcagctagttgagcaaataagtgttttgttgatgggggaaactcaggcactgtctgatcaaaatgcttatagaatgacttatgggcctggaattgtgaggttggatgcatttgagtccatctagtctttttgacaattagtagtggaattccaaggcctgctctttttctatgaactcataatagtgctgtctgtcctgtagaacaaaaaggtagctctggctttaagacagtaaaatttaaaggattgcatgttcttgtcttacaatctggtttgtttgacataccacttagcagagcagtccttcctgaataaaggtgttggagctgtatttgtgtagaccatggaatgttacagtctgagcatctgatttgtggttctccatacagatgtttaggactgctgctaagcctctcttgtgtcaaaccactgcagactccttctgttttttttaggatttgaacatatgcagcatggcaggcatcaaagtacaaggaaataggctctttataggagggaggggcttctttggttcaagctataagctctccttctttttctccctctgatttaatatgtacctcaaaccagaattcatagggtaagagcttagggtcataacataaatatagctgattatttcctgggtcacagactgaataggtggtctggttgtatgtgcaggttcctaacttggttcctgtacattcatagtaggtatggtacagtagagttttaactatggtattcgttacccaggtagtatgtacacagtgtgagcatccttctagagatttctccccttttagtataggcagaaatggtaacaacatcagtgtatgtaatagaaacatgcttatactacacatgtgcatggcaaaccttcctctgggcatagatatttgctgtaataacataacaacagaacaatcagtattgacagaattataactaggcttataaattgtatccacatttacttatctggagatggtcctcttagcttcagctgtgcatagactagtcagcttctgggatgtgactagagtagagcttgcaggatcctcaagcttcagccacgcgtagactgaccagcttccactgtgatcagagcagggcagttgtccttcttactggtggttgcgtttcgccgtaggactattcaggcggggtgatctgtgtcttgttggctaattcattggtcattgtcaggagtcactgctgccactggtttcggctggctatggtgaatcgaaggtgtgacacctgcgactttaacagcagtgggagtagacataattacaatatggggcccatcccataagggccccagggttgttggattccaccttttaacccagacagagtctcctggcttatgtggatgcactacatctcttagacttataagtatcctttcccttacccagccttttacctcctgcattgccactcctcaagcctgcatctgtgttctaagggttagctctcctaactcctttaaatgccctctaatttgattaatgattgcgggtggccttctgaacaatatttcatagggcaagtacccagtttgttttgtaggtgtacacctcacctggaggaggaccatgggcaagacctgatcccatcataagtgagtttactggcaaaattttttagtagctgtttgagtgtctgattcatccgttccaccttctctgaactctttggtcagtaggctgtgtgcaatttccatttgatctttaaaagttgagtcaactgttgtactacttctgccgcaaatgcaggaccattgtctgatcctagggttaaaggcaacccaaaccttgatattgatgtcttttagtagcacctttgtcacctcttgtgccttttcagttctgatggggaaggcctcaactcaccccgagaaggtgaaacaaacactagcatataccagtaacctcctgctcaaggcaactcggtaaggtctacaagcaggttctcacaaggcacagctcccatttcctgaatttctgggggtcgagtaggtccttgttttggattagatattgttcgcaggatagacattgttcgcaaacagcacgggtgatggcagagagccgtggcacatagaagtgttgacctatcaaagtctctagggccgtgcttccagcatgtgttccttgatggatctgcttcacaaaccttggggctattgtctctgggacagctagcctcccatcagagaacagccaccatccacctttaatatattttcctgtttcctggccaaaccaagctttttcaattgaagagtaattgggtacctctggcaaagggggctctacaaagagaggcattgctagagttatttcttcaggtaaaaccttgctcattgctgcccacctaacttcttggtctgccctcctgttgccctgtgcctcatagcttttcctaatttggtgtcctttgcaatgaatgagagccaccttctctggagcccatatggcttctaataattgcaaaatttcctctttattttgtatttcttttccttcagtagtcagaagtcctctctattgtatattgccccatgggtgtgcagggttgcaaaagcacagtttgagtcagtatatatgtttactttttccccttggccaataacagtgctctggataatgctattattaattcagccttctgagcagaagtcccagaagttaaggcttgagcctcgaccaccgagcgttgggtcactactgtataccctgcatatcgcaccccatttgttatgaaactgctaccatcagtgaagtattcaacatctgggctctccaagggggtatcccttagttcttcctagctcgagaacattttgtccactgaatacagtgcaacagtggggaaggtcctgccagcagtgaggcaacccaccattcttcaaagtgggctcctccacaggcagcagggtagctgggttcaagaaatttacagtctgtagtgttatctggaaattttacacagaaaactttgacactttagcattctaaagttggacaggcaacgatgtcctctttggtccattaaggagactacagcatgtggcaccccaatttttaacttctgtcctagggctagcttgttggcatcttctatgaggattgcagtagctgccaatgccctgaggcagtggtgccaacctaaggccacctagtccagtcttttggataagtatgctaccagccaatgtaaagagcccaacaactgagttaagactccgactgccattccctttcgttcatccacatacaaaagaagggtttttcttacatctggcaacccacatactgaggcctggatgagagcttcctttatatccttgaaggtcttttcttgttccttttcccataggaggggctctctttccctacctctggtagcctcatgtaagggccttgctataagggagaagtttgaaatccagattcggcaaaatctcaccacccctagaaattccctgacctgctgccgccttgtaactgggtggacaatgcacatacagcctccttgcgtgcacttccaagcctgcattggccttgggatactatgaatcctagatatgcaacctcccaaaaacagacttctgccttgtccttgaacactttataaccagcttcacacagcaggtcgaagcctctctgttccttggaggcattcctccctcttaggggcagttaatagcaagtcatcaatgtattgtaatagcacagaattgtcactagacggcgcaatagcctcaaggtcggtagccaaagcctccttgaagatagtgggagaattcttaaacccttgtggcagccttctccgggtatactgcgattgcccccactggaaggcaaatataggctgactttggggaacaagcctcaagcaaaagaaagcatcctttaagtccagacatgtgaaccccgcggcctcagcaggaatatgtcacaacattgtgtatgggttgggtactgtggcatggatagtggcagtggtcttgtttaccacctggaggtcctacactggcctgtattcaccatttggcttgagcacgggcagcagaggagtattccaagaggacttgtatttcactataatctcatgttcatagagctgatttacatgttttgttatgccttcagttgcctctctgggtaatgggtattaacggactcataccagggtagcatgagggttaagctctactaccaccgggggtctgtttagaacaagtccgggggggttgtcctcagcccatacacctggtaccttgaaaagcattccccacgtattgtgtaggtccagctccagcagcctcctggtacacagttcatagagccgccattcctcagctattaggagagctagagtcaataccattgcctttggcttccctacctccagggtcatattcccattaggtgtaaaggaaatttgtgcctgtatagtttctggagtaagtctctccccaacaagggcactggacaatttggcatatatagaaactcatgctgcacttcttgtcctccaataacacatctcctggatttgcaaaaaggtcccttttctttggccccagtagcccttacaatagtagcacagttctttgtgggggggctaattgggtgagttaccacagagaaatcagctctagtgttgaccaaaaaatccattgatcagccccctatttccatagaaaccatagccaccccccgaccccagggcctaaaaagatggaacgcggtctctcagtcctcaaaattcttggcccctgctaagccaatcagatcaggatctgcctttgaggcaccattactagcaacagaacgccgcactcgggtgttagactattgaccatcatctccatcctttgcctttttgggacactcatctttccagtggcctatttgcctgcactttgcacattggttcctgtccaaaggggacaggctttcctctcccagtcatgtctgccctcttcctcagcctctgctttgaccacgccctctagcaaatccaggtttactttctgctagtgaagcagctgtaaattgaaccgtgtctttatttctgtttctggtttttctttcttcctttctctctgcctcttcttcccagtttatgtatactttgtttgctatttccaggagttcactagtatttttccctgcaaagccttccagctgctgaagcttttgtcttatgtctccctgtgcttgcctgacaaaggtcatatttatcatgtgttggttttcaggagcctttggaataattggagtgtacagcctatatgcctcacaaagcctttcaaagaatgcacttgggctttcatcaggcttttggcgcatttctgacattttactcatattcattgcctgccttcctcctgcttttatcccattcaggagtgcctttctatatagccgcagccattccatgtcccttgcctcatttgggtcccagttagggtcctcatttgggtaacgctccaaggcaaactggcatgggttagggatggcctctggggcttccccttctaaccagctgagagctgcctgattaactctcctacacttctctgtattaaataaagttagcaaaagctgttgacaatccggccaggtcaggttatgtgttataataaaagcattcaccaaatcaatgagagcctgaggcttttctgtacaggaggggtatgctgtttccaatttaagagatcagtagtggagaaaggctgataaacataaagcctagggttaccttgtatctgcccctggtcatcataaacttgtgtccttgtctcttgaattggcatctgcaaagcccatggtaggccttagtggaggcacctagctgcctcaccctgtccatcttccctgtttttatctaataggggcttctttttctctgggtgggggagactgagcctcactttcctctgaatccgactctccagatgctcctgactctgcctcctgccttactctggccaaagatgggtagactggcacatatgggggtggacattccctttcctcaggtgggacctgaagaactggtttcagctgaggctttggggattccttttcctaggagacactagaagctttaggtttctctgttttactttggttgtgctgcctgagccactaatgccttgcaatatccctctaggcagggctgtcaccacttggggcgagtttgcaccacattgagccaagagtctatatagggaaactggtctgggtatcctggttgtcctgcaactccagtgaccaccttaaacacacggccaattaattccctgtctattgtacctttagagggccaccccatattgaaagcaggcccatctatctcacagtatgtccttaacctttgagcaacaagtttcatcccataatcacctctaaatccttttttaaaattctttatcatgcactccaaaggagttggtttcaatgctttccctctcatttcctcccttgcagtgcactttcactctcactttcactcacaggtccaccagaccaggtcctattatgagagttttggatgctgcttagtcaggaacatgccttcccctgtcacagcctgctgcagctgtgaagctggtcctttcagccgtatgcagcatcctaggtctgatgtcccctgcactcatgtcagagcacacagcccatgctaagggatctctgcctccccatgtcactccccgcactggcctctcctgagaccatctctttcacacactttcacacacctcccctgccccaagattcctcactggatgaaactagcctgtctcatgtcctgggtgagcctctctcatgtcctgggtatgttcacgtgcaccctcaacactcccagttggggtggcaagccactcttgccaccctgccagcaagctctaccttgctgcacttgctgctctattggcccatttcctcatttttttccagttccagtgttagtggggacttgaggtgcatccaaattggcaagccactcctgatgcccccagccactctgggttggattagtgttcattctccgggaggtgatcaagctccccttcatcctcatgggatgggctttgctgccttgggcactttctctttactgcagttcctgaagtgctggtatcatcctgcagccccattcccagttccattgcactgccaggcagggtgtcagaatatggggagagctggtttctatccagttgaagctcccctgtggtgtgccttggatgctgggtctctcctagccccagagctctagtctcacaggcaaaggagacagtaaatctgtcatctccaaccccaggcaagccccccacccccaagaaatgtagtgggatttttaaggaatcagagagaccattggggttcaggaggatattcattaattatttaggtgcaccagccgtcggattaacatccaaaggactgagccctgaacaaagagttaagttaccttttaagcatttagtggggtggggggagatctctgcagagggaagcatactacagaagtgagaaacaaagccagttattcaattgaggtatgcattacatcatttcttacttttcaaggagaaacatgttttgtgacttgagtttgtctgtctagtgaccttgcagctgcacagcaagggaatcagggtcttcacaatgcttgggaaaggaggagagataaggctcactaaccactgaaaaacaggcagttaatttttaaaggactccagctctttctgtttctcaggaggaattgggttttcttacatacaactgagtttctgcttacacactctttaatttcttttaattcctgttccaaaaacagggggagtgcccaggttgttcacactcttccatcactgcatgctgggttcctggtatatgcattgtgtaaacattcatcaagctgttcttttataatgtatggatattttgtgtgaaattaaaaacatacctttttgattttttatttatccttttttatttcttcttcagtcactttttgacacatacttttctggaaaaataattttatctaaatttttaaatttaataacataaaattgtttaaaacaatatcatgtttaaatatttttattattttttttttgagatggagtcttgctctgtaacccaggctggagtgcagtggcacaatctcggctcactgctacctctgcctcccaggttcaagcaattctcctgcctcagcctccaaagtagctgggattacaggtgcatgccaccacgcccaactaatttttgtatttttagtaaagatggggttttgccatgttggctaggatgttctcaatctcttgacctcgtgatccacctgcctcatcctcccaaagtgctgggattgcaggcatgagccaacgtgccttaatatagaaggtatctaaaataaactacagcaaatgtgcatgataaactattgagatcataaatattataaggatgctactgtcaagatttttattaaacattggatttatggtcccagccaatgcattaaaatgagatcagttttacaactatactttaaagtataacaagtcaataatctagtacctaaacaattggttctacctggatagattggattcccacacagcaactgacacgacaatttttcacatagattcagaatttaaaacttttaggagaaaatacaagataatattgttgtgataactgtgggtgtaaagcaatttcttaaacatggcacaatataaaaacttgcataaacatatttataaattagatgaaattttaaaaacttttgattatcaagaacttagaaaaacatgtttgaataaagatggtggaaaggcaaatcataaccaagaaaaaatatgtaaaaaacacatattacaaaaattagtatttagaaaatatgcactacagaatatgtattaatatacaaagaaatgaaatacattaaaaatggacagatggcacatcttaaaacacatatgaccaattaacctctgaaaaataccaatttatttagtgactatggaaatgctaattaaaactctaaattatatacttttctgattctccattttgtcaaaaaatatgtctagtaattccaagagttgataaaaataaagtaattggaattcacaaataaccactggcagtagaattcgtttataaattgatgtatattcacactgcggcagtaaaaatggacaactatagctatgcaaagcaacatggaaaaatagaaacaattgtaaataaaaaagcaagtcacagatgaaaacttgtagaattgatctaaagtcaaaaaacaagcaacactgaaacgtatattgtttatagataaaattgcataaagtaggccaggcaccatggctcacgcctgtaatcccagcactttgggaggccaaggtgggtgaatcacaaggtcaagagatcgagaccgtctggccagcatggtgaaaccccgtctctactaaaattacaaaaattagctggacatggtgttgcatgcctgtagtcccagctactcgggaggctgaagcaggagaattgcttgaacccagaagatggaggttgcagtgagctgagatcatgccactgcactccagcctggcaactgagcaagactctgtcaaaaaaaaattgcttaaaataaacgacaatatgaaattcagatactggtcacttttgggttaggaggttgttttttgtttgtttgtttgtttgagatggaatttcactcttgttgcccaggctcaagtgcaatggcacaatctcagctcactgtaacctatgcctcctgggttcaagtgattctcctgcctcagcctcccgagtagctggtattacaggcatatgccaccacacctggctaattttgtatttttagtagagatggggtatctccatgatcatcaggctggtcttgaactcctgaccttaggttatctgcctccctcagcctcccaaagtgctgggattacaggcatgagctactgtgcccagccaggttaggaggtttataggaaaattcagaggtatccacttctcaggaatgcgtgatgattttatgaagttacactgaaagtttcatgagagtagagaccaatactttcttttctattttattttctaaggctgccaaaaggatagcatattgtgtgtggtcaacacacatttatcagttaaaagaatgaatacatacatattctttgtaaaatgtgaaactatgcaaatcaagattttattatttttatttcctatagttaacagaatcaaatagaaaataataaagtataaaattcagaaagcactattgaaagtttaatgttaacctagcacttgcaggtaaaaatatagcaaaatttttagtttccacatttgtgaccattataattacatcaaaattgccccatgaggaaagaacatgaaatctgacttcagtagagcacaatttaagaggaaaaagctgaaataaaaagaaaaagaaaagaaaaatataaaaatttgattgggtcaaatctctaagttattctccataatttttttttttttagaaaataatttttacctctgcttgtgcagagtgaggctggctggtggaacctaggcccctctgtcccccccaggtggcagtggctgatctctggtcaggcatgaggggtgcctccatgtatgagttcagtcagggtgtggaaaaacttatagagaaagatgcaaaccttcttggaaggccaggaggtttttgcaaatcttcaggaaggaatgagccaaaggtggctgttctttcccagcggtaattagacagatgtagatacaaaggaatgtaggggagcttatctaaagaccttgtttgctcatgttgtcctaagaccgacctttgatcatttgtgggcagaactgctctctactgggggattgacaatgttaattacccactaatagtgtttactcgagacttttgtcatttaatctgtaataaatacatgtaaacttcaccggcttatggaggtgggtgctgctcattctgttagcacagcctcttagctgcagtgacaggcaaaatatctgtgtcagtgtacgtctttcatccatcactgtgtcagggtctgtgggtcagacctggcactgccacgcactgggcctgaggctgcccagcccagctgctcctcattcccctggactcttccatggtatctccaagcccctgcatcatcctatctgtctctctgatgaaaggtgaggtggcagcacaaagatgatggggaaactgccccacatgccgaggaaagcttgcccagctgcacgaaatgctctggttgatgggtttctgcgcaccaagctgggccatgaccaagggttagagtggaggcgtaccagggtgagggtgctttggctgctgcaggagcttccctgctggcaggaggcagcaatagccatggtcattgaaaacaaggctctgctgataaatctcagacaccaggatcagaagaaaccagagaaactgctggagagcttgagccaaatggacagactgttggagcagctgagggtgaagctgcatgaacatcaccaaggatagaaatggaaatgatgaaggagtctgggaaataaatgatagaagataaaatacagccgtgaacatggtaaggtgatgacgattctggtccattggatcccaccatctccaaggcagtaaatctcatcacagtcaccacccagcaagttgccaccacagcattttctgtttgttcctaaataaataaaggtgattctcatcacaagggcaaatacaaatagtggtctattatgtttttaactaaactgtaggggtttcatttactttttctaagttctcataattttgaaaatgcggttgtcatatatatggcttaagaagtttttgataggctaacgttacttgaattgttcaaaaaccactatattttaaattaagaagaataaacaatgtatttgttttatatatttaaagcttagagtcacaaataatgctcctgtttatgatttgaaaactttaaagtttggttttccatctgcatgtacagaaaacattgcatcacaccaaaacatgtgttttttaaagtggcagtcataattcctgtctgtctggatatattttggacttttctatgttaagcataacataagaaagaaatttcattagccgcgcatgtaggcttacgcctgtaatctcagcactttgggaggctgcagcaggtgcattgtctcaggtcaggagtttgagaccagcctggccatcataatgaaatcccgtctctactaaaaatacaaaaaattagctggacatggtggcagcacctgtaatcccagctactcaggagggtgagtcaggagaatcgcttgaacccgggaggcgtaagttgcagtgagccgagatcgtgccattgcgctcgagcctgggcaacaagaacaaaactccatctcaaaaaagaaaaagaaaaaagaatttcattttgttttaggtaatctaagattgttgtacacaaaaaactttatatattatggtagggttcaggaaactatgtatataacctaacattaatatcacttttttaattttttttatttttttatttttttttagtatttattgatcattcttgggtgtttctcacagagggggatttggcagggtcataggacaatagtggagggaaggtcagctgataaacatgtgaccaagggtctctggttttcctagacagaggaccctgtggccttccgcagtgtttgtgtccccgggtacttgagattagggagtggtgatgactcttaatgagcatgctgccttcaagcatctgtttaacaaagcacatcttgcaccgcccttaatccatttaaccctgagtggacacagcacatgtttcagagagcacagggttgggggtaaggttatagattaacagcatcccaaggcagaagaatttttcttagtacagaacaaaatggagtctcccatgtctacttctttctacaccaacacagtaacaatctgatctcttttccccacatttcccccttttctattcgacaaaaccgccatagtcttcatggcccgttctcaatgagctgttgggaacacctcccagacggggtggtggccaggcagaggggctcctcacttcccagatggggtggctgggcagaggcgccccccacctccctcccggatggggcagctggccgggcgggggctgccccccacctcctggacagggcggctgccgggcggaggggctcctcacttctcagacggggtggctgccgggcggaggggctcctcacttctcagatggggcggctgccaggcggaggggctcctcacttctcagatggggcagccgggcagagacgatcctcacctcccagatggggtggcggtcaggcagagacactcctcagttcccagatggggtcgcggtcaggcagaggcgctcctcacatcccagatggggcggcagggcagaggtgctccccacatctcagacgatgggcggccgggcagagacactcctcacttcctagacgggatggcggccgggaagaggcgctcctcacttcccagactgggcagccggtcagaggggctcctcacatcccagacgatgggtggccaggcagagatgctcctcacttcccagacggggtggtggccgggcagaggctgcaatctcagcacattgggaggccaaggcaggcggctgggaggtggaggttgtagcgagccgagatcacgccactgcactccagcctgggcaacattgagcactgagggagtgagactccgtctgcaatcctggcacctcgggaggccgaggcaggcagatcactcgcggtcaggagctggagaccagcccggccaacacagcgaaaccccatctccaccaaaaaatgcaaaaaccagtcaggcgtggcggcgcgcgcctgcaatcccaggcactcggcaggctgaggcaggagaatcaggcagggaggttgcagtgagccgagatggcggcagtacagtccagcctcggctttcacaactttggtggcatcagagggagaccggggagagggagacgagggagagggagacgagggagagggactaatatcactattttctgatgtctatatttttttagaacttttttatttttacaaatgtctccacaaattctaggatattttataaaatagcagaatactaaagaaatgggtggtttgccatactatatgaatactggtattcaattaaaataacaatattttcatcaaaatttagacagtagatttaaatttcttgatttttcactacagtgatagacattcataaatatttcagaaatcagagctgtattaggttttacttagtagtaatatgtataaaagatcaagaatctgttcaaaatagatatttctcatcaataatttgatgctttcaaatacccagaagttttgttttaatcagatgaagtctgaggatagtttactagttttattttttgtatgatgtgttcacaattttctaatttaacctaatattgataatggtatacaaatcaacttttttttcaaatctcataagtctatttattatgttgttgaagatatttttagttaacattccttctttcagtattttttacaggaatttacatctagtcaaatttgcttaaactgttaatcagtgtcaggtgccagattccaattcatttttagtgtgcctgtacttttctttctataacctctgaactaaatttatattgcttaattaaatgtgatataatacaactcacatatttaaaacaaaaccaccaggtaaaatgaattctggcttagtataaagaagctgttaccaaattagtgtcacatatacagatggatgtggctcaacaaaattttacacaaaaatatttggattgaactacacgtgttgccatgacttagcctctaatgaccttataaataaagacaaattaatacacatttattcattttctttcattgtgtctaaaggtagcatgtcaggaaatctcatgctactgtctgaaaaaacacattctactgttacctaagaaatcaactggatggcatttttataaccttgcaccacataaggaaaaactgcaatgtagtctgataaatgcagactccatcacatggaaaaggataatccagaatgccactttcaatacttaagtattcaaccttttggttgaaaaatgtagtaaaatagagctcttggtaagttttgtgtagcttaacatcagcataaattaggaaaaaatatcttttaaaatgtaaacaaacaaaaacctacaccaaaaacaaaaacattcaccaatgcatacatattgactgacgctccagggacataaaataatttttcctgggtacacagctagtgacccaaatcaagctcaaatgtgtgattttaaaaatttcattttcccacttttgacaatattgacataacagcgaaatcttactctcagagttgatagttgaaaataaactaagacaagtactgttgagggaggctaggtagccaagaaggtcaccatgtccttgggacatgcagcaggcatggcgattgcatagtgacagcatattggcaacacaataagccccaacatttgcattgtatttcagctcactgaagcacagctctcttcagtagggaagagagttctttactcccctgtaaagaacatgcacattttgattttacttgtcctctgaccttttactcattataatagtaaaaaacacacaagtgagtggagattaaagatgctaataagatatgtgacacataagcatgtacagccactgtgtatgtacaccaacaagaccactcagaacatgctaactaataacaccactttccacctcttcataaataatgatctaagactcccatagatggagtctctctagttccagtctttgctgtctcattcttataagcagcccaccctgaatcccttctctcttggggctattttgcacctaatttttaaaatagtatttcaactttgcaataaatccctctatgttgcatcttcattgttttgtgtctcttgtttaaatttttgaaactaagaaccaaggtctcacaacagccatcaacactatcgtgctttgttttgtattcttcattaacagtatttttgggaatatgtcaatatctacattttaaacacagcccaaactgctaaattaaaaatttaaatgattgtaaaagcatgtatatttttcaagtttcagcttcattacactttatgtattgaaatttttaaaaaattctgccaggcacagtggctcacgcctgtaatcccagcactttgggaggcagaggcaggcagatcatctgaggtgaggagttcaagatcagcctgggcaacacagtgaaaccccatctctactaaaaatacaaaattagctgaccatggtggcatatgcctgtaatcccagctactcaggtggctgaggcaggagaatcgcttgaacctgggaagtggaggttgcagtgagccgagatcgtgccattgcactccagcctgggcaacaagagtaaatctccatctcaccaaaaaaaaaatttaaaaaaataaaaaatattgtgacacaaatatatctgtcaaatttaatatcttacgtaataatttgaattcacttccaaaatgatttatattcatttattgttatatttacttttgaccaaatttagctttccaaactaaataaaaactgaagcatgttttcaaagtttcaaggaactaaagtttactggcatcaaattctctgtagtaaaatgaaaaaataaaaccatctttttatcaataatattttatatctgagcacttaagcatcaaggacaggattttggatgatgttgagtgaatatctaaattaatgaagtagaaaataattatcagaatagaataagtgatggatacagaaacagagcacttgacaaaaccattcagggtatgtttgacaaacaagaagattgtataggacctgcactgcactgcactactaatgtaaagcgttctctgtaactttagtctttattctcaagcttacaaccaccacatactcacatacacagaataaataagattagctccttttcctggaaggcagtgattcctcttttattctattacgtctgttccatattgctgtgataatgctgttgaagtgcaccctgttacaccagaagatcacctgtgtgaatgtgaatagactgacactggagaggaccagctcagcaaacacatttgaactgcctctttgcatttcaggcagttaaaaatgcctttgaagagtgaaaataaagttactgctgattaagcagagagtttaacatggaaaaacgtttttcaattgtttaaaaattacaatgcatggactacaacttttaaaatgtaaaatgcatcacataatactgcaaaaaaaaaaaagaatagaaatgatagggttggccacaaaggacagccaaagctgtattatagcaatatagaaaaatacatatctactgccagaggaaggtaacttgaagtatttgagaaatgtactctaaaaatctaaaattgtttttagtattagtttctataaaaaatgttccttaagcattttgaatttttgaaaaagttaaatacatgctttggcagtttagcttttctgaataatttgaatagaatagaataaatacatatcaaaatattaatttttctggtaatggataactttcagactaaaagagttaaactttacaaaattgtatgccgatcaatttgatcagaagcctctttcttggaactggaagagatgacacaaagatggtgctttcatgttgggtgggagagaaatggttaccaggggctacatcatagttgtttcactaatgaacattgattttcattgctattttgtctaaattatggtaataattaatggcctcgatccaaaaaattttcttaaaacttaagttgtcaatcagccataatattaaccaaaaatgcattaaaatgaaggtatttaagttataatttatattttcaaattaaaatacttctggaaatctttaaggttttctaggtagagcattatcagtgaagataatttaatttcctttttttctatttagatgcttttaatttctttattttcttggattgttctaactaggatgtctaaaattatgttgaataggagtgttagaatggatatttttgtcttatttttattctaatggagaatgcatgcagctattgccttttcagtataatgttggctgaggatttttaatacatggctcttgctattttgaggtatgttttgttaatggtttctttgttgagaatattttcatgaatgaatattggatttccttgagtgcattttctgtgtctattgtgttaattgtataattttttaattatctgtacatggtgaattgcacttactgacttgcatatgattaaatatctttgcataggtggaattaagctcacgtgattgtggcaaaacgttttgatttgcttatgaactcagattgctcgtatttcatggaggatatttgtttcaatgtttaccaaaaatattggcctgtagtttcctttttttgttgtgccttcactagattttggtatcaagataatattgattttataaaatgagttagggtggaattccatcctgattttttggagtacattcagtagtagtacgagctcatctttgtatatgaggtaaaattttgttgtgattttacataatccagggcttttatggttggtaggttttttattactaattcaatttcatcatatatattttatacatttttgccctgttcaagacttctgtttcttcctggttcaatcttggaaatttgtgtgtatccaggagtttatttattttcttaaaattttctagtttgcaggcatagagatgttcatagtagtctctgatgattttttgtatatatatagaattaattgtgatttcacatctctaacatttaaatagatgcagagtacaaaagaatagatgcacacaatggaagtttggcaaaatttgacattcctttatgataaatctctgaaaaaatttgttatagatcaaattattggcacctcagccaataagtgccacatacaaccaaaaaatgcacaggtaacaacatactaaatggggatatgttgcaagattttactcaagagctagaacaagacaaggatgcccactcatccttgctaaagtcagtcttactaaacatagaatgaatctaaggcaaagaaattagagaataaaatcaaaggcatccagattggacaaaaggaagttaattattcctgtgtaattatcttttatccttatacataatctgaagtatagaaaaccctaagactggctgggtgcagtggctcatgcctgtaatcccaatactttggaggccgaggcaggcagaccacctgaggtcaggaggatcgagaccagcctggctaacatggtgaaacccaatctcaactaaaaatacaaaaagaaaaaaaaaaaagttagccaggcctggtggcacaatacctgtaatcccagctactctggaggctaatgcaggagaattgcttgaacctgggaggtagaggttgcagtgagccgagatcatgccactgcactccagcctgggtgacaaacgtgagactccatctcaaaaagaaaagaaaagaaaagcctaagattttactaaaaactattaaaaataaacaaatttattaagctttcaaaatacaaaagtaacatcaaagtcagtagcatttctacacattaactatctcaaaatgaaaattaaaaaacaatttcatatacaataactatagtagtaaattcaatacaaagcagagagtatacatttgctttcagcatttttgaggcttttagttttatactagttaccttgttaaaataatttttccaatatttcttatgaaaataagtacaaacttatactaacacagacttacttactccatcatttccttacacctaaagtttatctctacagtaatgtatatttaaccctctgtatatcaaacctaaaagtctgtatgtgtttgcaggcagacaggacacaagttcaaatatatatatgtttaaaattttaagatatgtactcagaactcagaaatgtatgtatttaatttatacttgcatatgatttctataataaccataaaaatatcccagtagtcaataataatttaatcgtactttattttttatttctttttttgcttgagatggagtcttgcagtgtcacctgggttggagtggagtggtgcaatctcagctcactgtaacctccacttcccaggttcctggccatctcaaactcctaatctcaggtgatccatccgccagggcctcccaaaagtgctgggattacaggcgtgagccactgcacccggccataattgtacattttaaaataagtaaaagtgtacaattggattgtttgtaatacaaaggataaatgctagaggtgatggataccacatgtatctcgatgtgagtattatgtattgtatttgtgtatcaaaatatgccatatatgccataagtatatacactcatgtacccacagaaattaagaaaaacaaattaaatgattaagaataaaaatttaacctacaggaacaatattctttaacttatttgcagtttaaagccactggcaaaagagatgactaaagatgttagtccattatgttaccaaatagtatattgttaacattttttacctatatttttgggcaaagtggaaaaggttaatctttgtggtaaaataacacttcattgaatgcacaatagtatttaacatgttaaaaatgttgaaacgattaacttcacacataatctaaaatttttaaaatgtactgcattttatcatataaaagtacaattagtacaatatatgaataatatactactagttttctcgtaatgcaaagaatatcactcttaacacctacctcgtgcatcactcaatagtgtaagttaaccacaaagaatctctccacttagattttcatcatgcatcttacattctaatatccttacttgtacatagaaaagatcataaataatgcccacctaatgaaaaagaatctctcatacctttgatgcagcaagaaatgatcacaaactttcacaagtgaataagaatgaagaaacagcagaaaataatgacagttgaattacatcatttgctttcaaaaaatctgtaattttttcaagaaataaagtatactttgaatgtagttattactctgcaaaaaacttttactcctcttaaagttatatacaaataatttttataccaactttagttttagattattttctatactcagaactctgatttagtataacatctgaagtgtcagttccttatatatttctactataaattctctgatatttatgtagacttaaatttgaattaaattttttttttcatttttactgcattttcaaaaacatattgtagtataaactctggtgttttctaagctgtagtttttgaaaatttgttttcccaaatttattacatttgcaagacaactcttcaatataaattccctgatgttgaacaaagtttaagcaactcctttagagttttcctctagtacaaaatgtggacaataagatctgatacaagtaaagctactacaaccctctttacacgtgtaatgctcatcttcaatataaatcctcttcttcactttaaagaataagattttctgaaaggtcttttgacggtaattgcacttatcatgcttttagtaagtattaactctctggtgttagtaagatgtgagcagatattaatgtctttttcacagtctatatttgtacaatttttctcaaatatgaatgcttttctctgcaataaggtgtgagtattagttaaaaattttgccaccttgttctcacttgtaggaattttttccactatgaattatatcacctataatcaagtatgacaaccatttaaagactttgtcacattcttcacatttctaggatttctcagcaatatgatttctcttatggttagaaaagtttgaggtattgtcaaaagcattatcacatctttctgatttgtagagtttctctccagtatgaattatcttatgtgtgttaagaactgaggactagctaaagcctttgccatatttttcacactcatggggtttctctccaatatgaattttcttatgtttattaagaattgaggactggttaaaggctttgtcacattcttcacatttgtagggtttctctcctgaatgaattattttgttcaataaagttttaggactggttaaaagctttgccacattcttcacagttgtaagcagcttatgttatgtttagtaggagttgaggactggataaaggctttaccacattcttcacatttgtaagatttttctccagtatgagttatgcttagtaagttttgaggattggttaaaagctttgccacattcttcatatttgtagggtttctctccagcatgaattaacatatgtgtagtaagggttgatgattggttaaaatgtttgccacatttttcacatttgtagggcttctctccagtataagttatcttatgtgcagtaagttggggggacaggttaaaggctttgccacattcctcacatttgtaggttttctctccagtatgaattatcttatgtttagtaatggatgaagatttgttaaaagctttgcaagatttttcatatttgtataatttctctcccttatgaattattttatgtttagtaaggtatgagaatcagtaaaaagctttgagacattcttcatatttgtaggatttccagcatgaattatcttatatgtaggcaagattgaaaagtggttaaaagctttgtcacattttacacatttgtaggatttctgtatggtatgaattcttttatgtttagtaagggtcgaggaccaattaaagcctttgccacattcttcacatttgtagaatttctctccagtgtgaattttcttaagtttagtaagtatgagaatcaatagaaacctttgccacattcttcacatttgtagggtttctctccagcaggaattatcttatgtgtagtaaggtttaagtaccgtttaaaagcttttccacattctttagtaagggaagaggaccagtaaagccctttgccacattcttcacatttgtagaatttctcctcagtatgaattccaatatgaatgaccttatgtctactaaggtatgaggaccacttaaaagctttgccacatttggctgggtgcagtggctcaagcctgtaatctcaggaccttgggaggccaaggcgggcagatcacgagttcagaagattgagaccatcctggctaacatggtgaaaccctgtctttactaaaaatacaaaaaattagctgggcgtggtggtggcggcctgtagtcccagctactcaggaggctgaggcaggagaatggcgtgaacccgggagtggaggttacagtgagcctagatcatgccactgcactccaacctgggggacacagcaagactctgtgtcaaaaaaaaaaaaaaaaaaaaaggaaagaaagaaaaaaagatgaattatttcctttaactaaaaaataaacacaaaatttcagaaaagacacatttgaagaacatgtttaagagactctcagaatctctaactcagacaattgttcaaggtatgccaggggaaagccacattataaagattgggacaggtaagtttttttaatattcaaatttgaataaaagattatgatgtggccaggcgcagtggctcacacctgtagttccagcactttgagaggccgaggcgggcatatcacctgaggtcaggagttcaagaccagcttgaccaacatgaagaaaccccatctctactaaaaatacaaaattagccaggcatggtgacgggcatctgtaatcccagctactagggaggctgaggcaggagaatcgcttgactgggaggcgaggttgcggtgagctgagatcatgccattgcaccccagcttgggcaagaagaggaaaattccatctcaaaaaaaaaaaaaaattacaatgtatataaaatagggcaatgtggttccattaaaaataatataaaattttcagaaagaaacaataacaaatgtttacattagttttaaaaattgaaaataaattgaataatacccaatgagtgaaaaaagaacacagagaactataggatatcagaaaactggaaataagaataaaaatacttaaaatattagaaaaaagaaattatggaggtaaaaaatatataaagaataactgaaaaatctttaaaaaaagacataaaaatgaagaagctcaacaaacaaactaggatacacacaaagatatttatatcaaacacatacataagcacaattttaaaagtcacagaaaagggaatcttgggagctgcaagataaaagtgatgtgttggctgggcatggcagctctcacctgtaatcccagcactttgagagaccgaagcaggcagatcacctgaggtcaggagttcaagaccagcctgttcaacatggagaaacctgtctctactaaaaatacaaacttagccgggcgtagtggcacatgcctgtaatagcagctactcgggaggctgaggcaggagaatcgcttgaaccaaggcggcagaagttgcagtgagctgagatcacaaaattgcaatcagcctgggcaaacaagagcaaaactcagtctcaaaaaaaaaaaaaaatggtgatgtgttatttgcaagaatactcttatgggatatccaatggattctcaacaaaaattttgcaggccagaaggaaactgcatgatatatttaaggttcaaaaaaaatcaagtgagtataataccatcaccaaatctgtccttccaaataaaaagaaaaaaacctcaaaaataactaaattctaaaacagtatattggcactgccttacatataaaaggtgctgaaagcagtcgcttccaatgaaaataacatgattcaacaaaacaacacataatcatattaaaatacattattttctgggaaagatgtgtacatacacaaaaataaatttcttagcacaaagaatacatctatatagatacacaaaataagaaagaagaaaaagcatatcaaaatcaaaataaaaaagacacaaagagacagaaagagagaaaatgtgggacacaggtacaagaatcaaatagaaaaataaacaaatattagtctctttgtttaagaaaactttccaatcaagagttatactttcaataaagaaatttatttacaattattaaaaaccaagatccaatttgcctttctacaagggtcagctgacatctaatgataaaaaagatactgaaggtggcaagatggatttagacattggatgcaaatattaaccaaatgagagcagaagaggtcaaaatagtattacaaaagctacatcttaagtcaaaaactgttatattttatataaagtactttaagtcaaaacagcaaagaggcaaaggacattaaacaataatagatatatttactgggaacctattgcaaatttgtgtgcgtgtgtgtgtctgtatttcacaccaagttttcaaatatataaagcaaatattgacagacaggaagaaacacctaaacagcaatataattatagtaggaaatttcaataccctactttctgtaataaaaataaaacaagacagaatattagtaagtgaagagaggaattgaaggcagtataatacaattatttttaacagtggaatagacaagagccctcaacaatatcaggaaacacattcttatgaatagcttatacaacattctttttgatagaccacctgttaggccaaaaaaaggagtcttgaaaatttgttaaaattgacattttgtggattacattctataaccaaaatggaatgtaagtatagaacagaaaaaaaaattaaaaatgtacaaatatatagatatttaacaacacactcttcagcatgctcctgttcaaaagttgaaatattttgaagatgtccataatgctcaatgtaatctacagatttaatgcaatggtttcttttgttttgttctgttttgttttgttttgttttgttttgtttggagatggagtcttgctctgtcacccaggctggagtgcagtggtgcgatctcagctcaccgcaacctctgcctcccaggttcaagcgattctcctgcctcatcctcctgagtactgggactacaggtatataccaccatacctggctaatttttgtatttttagtagagatgaggtttcatcatacaggccaggctgggttcgaaatcctgtcctcatgatccacctgcctaagcctcccaaagtgctgggattacaggcgtgagcccccacaccatgcaataaaatgtttttaaaaatttctcattccatttttgaggaaatagaaatagcaatctcaaaagtatatagactatcaagagaaaatgaagtacccaacagtcttcaaaagaagaaacaatgttaaaggcattacaatttctgatttgaaaacacattacaaagctacagagttaaaacaatttgggggctgagcacagtggctcatgcctgtaatcccagaactttgggaggtcaaggcagcaggatcacaatgaggtcaggagttttaaaccagcctggccaacatggtgaaacccagtctctactaaatatgcaaaaattagctgagtgtggtggcaggcacctgtaatcccagctactcaggaggctgaggcagaagaatcacttgaacccaggaggtgaggttgcagtgagccatgatcatgccgtcatgccattgcaacccagcctgggtgacaagagtgaaactctgtctcaaaaaaaaaaaaaagaataaagaaaaagcaagaaaatagactttaaaaaaatctgtatgagtatagtcattaaaaagtgaactaataaaataggcagcacttatataaactttcatatacatgatcatatgaagagttatttgcatacccataattattgcagcattgttactgaaagccaacaggtagaagcaattcaaatttctgtaacaaaattattcagtagatgtaatttgaaatagaaaaataccatattatcatccagaattttataagcaggaaatactctaatactctttatagataaattttgacattatgcaaaatgaaatgagtcagccacaaaaagatagaaattgtaagaaatatatgaagcagttacactcttagaaaaagaaaacagaatggtgtttggaaaattcagaaaaccagaaaaattggttgttgtttaatgtgtattgagatttcgttttgaaagataaaaacattttagagatatgttgcataacattgtcaatataatatgactaaacagaatattaaaaaatatttgataataaattttgttatgtttttgacaagtaaaactaatacctaaaaatatagagttatgagagttttaatattatcttcaaatcccaaagtgttccttacacacaaaaataatatagattcacaatagacattgaaattaggagaatttttacgactgctcacctagacaagattgaacaaccatttacaacaaacctacataacaaatatacaagttattttaaaaacagcaataatatttatagagggaaacaaacatagaggtaatgatattggaagcagacatatggctgattcgtagttgattttgctcaacactgtcttaaattgtacagagttaaacattgtcatacagaattataatataaatcaaaacaacaaaacacaattaactggtttgaggtggcataccctgaaatacataacaaaaaatataatattgccaaagaaaattaaaatttagaatgtaaaaattattggacaccatcaagtagatcaatatattcatgaaaggaatcttaaagccatatataaaataaagcactctattaaatataaatataaagacacacatagaatgttttactgtcataatgatggtacataaaacctttgaagttcttctatagatataaaaaaaacataaatctgcacaaatctgttaatagatacaaaataagataacataatttgtaatacctataacaaactggaaaatatagcagtatagcttttgtatttaattaatgttattatgagattaaaagatactgttttaactttaaggtgttttatataatctccagttttcaagatggttacaatatacttcaagatgattacattatattataggaagtatgcaaaacaaaattttaaaaatcacaccatgtcacaacaaagttaaacaaaaattatgatagtaaaacaggtaatgagaaaaaacatgtctgcaagaaacacataaaacagtaacagtgaggtggttcctgtagatcagtagacttagtctttccctctgctggctctgaggaatctgggcagtacagatgtatggaatctccccctgtgcagcacaccccctacaccaaggagcaaccagagtgctttgttaagtggttcctggatcttgtgcatcctgacttggtgagaacccccccctcaaaaggtggtgtcaggcaacttataaaggagtgttcccattgtcatcaggttggtgcccttctgggaacaggccttaaagaaactggccataaactggatttctgcagcaatgtgacatgctcatgatggctataatgcacactgctagaagttgttggtttactggagcaggcaaggaacatctggcctgcccggagcagaaaactgctcaaaccacacacaatagcaggagcagcctgtgccttaacaacatgtttttgctacagataatcagccagagcctgtttctctactctttgctaagaatgctttgtttcccataaggaatgcttttagctaatctatagcctatagaaacaatgcttattactggcttgctgtcagtaaatatgtaggtcaaactcagtttgtggctctcagctctaaaggatgttgcccctctgactcccactctgcactctatttctgtgtctttgtcttaattcctctagcaccactggtttagggtatccatgactgagctggtctcagtagtgtccctctgggattaagatctcagagaaaggaggagacagtcatctctgctgttctgcagcctccactggtgacacctccaggtgtgagagaaacccagacaaatagagtctgaagcggattccaagcaaatgacagcagccccacagaagaagagcctgactgttaaaagtaaaacaaaaagacagaaagcaacaacaacaacagcaccaacaaaaaagtccccaaaaaccctatccaaaggtcagcagcctcaaagatcaaagctagataaactcatgaagatgagaagaatcaacaaacaaatgctgaaaactcaaaaagccagagcccctcttctccaaatgatcacaacatatctccaacaagggcactgaactgggtgaaggctgaaatggataaattggcagaagtagtcttcagaaaatgggtaataataaactttgctgagctaacaaagcatgttctaagccaatgcaaagaagctaagaatcataaaaaactaccttagagagaaacagaaatgacctgagggaactgaaaaacacaacatgagaacttcataatgcaaccaatagtatcaataactgagtagaccaagcagaggaaagaatttcagagcttgaagactagcttgctgaaataagacaggcagacaagattaaaaaagaataaaaaggaatgaacaaaatctctgataattataggattatgtaaaatgatcaaaactatgactgtttggggtaccttaaagagatcaagagaatggaaccaagttggaaaacatacttcagtgtatcatccagaagaacttttccaacctaacacgacaggccaacattcaaattcagaaaatccaaagaacctcagtaagatgtttcatgagaaaatcaaccccaacacacgtaatcatcaggttcttcaaggttgaaatgcaggaaaaaatgatatgaacagccagaaagaaaggccaggtcacctacaaagggaagctcatcagactaacagtggaattctaagcagaaatgttgcgggaagtcagggaccccgaacagagggactggctgaagccatggcagaaaaacataaattgtgaagatttcatggacatttatcacttccccaatcaatactcttgtgatttcctatgcctgtctttactttaatctcttaatctcatcatcttcataagctgaggatgtatgtggcctcaggaccctgtgatgattgtgttaactgcacaaattgttcataaagcatgtgtgtttaaacaatatgaaatctgggcaccttgaaaaaagaacaagataacagcaatgttcagggaacaagggagataaccctcaggtctgactgcctgagagccaggtggaacaaaccatatttctcttcttatgaaagtgaataggagaaatatcactgaattctttttctcagcaaggaacagccgtgagaaagagaatgcactcttagggggaggtctctgaaatggccgctctgggaatgtctgtcttacacagttgtagataagggatgaaataagccccggtctcccatagcactcccaggcctattaggatgaggaaattcccacctagtaaattttagtcagacagtttgtctgccctcaaaccctgtctcctgataagatgttatcaatgacaatgtgtgcctgaaacttcattagcaattttaattttgccccattgctctgcccctatttgccttgtgacattttattgccttgtgaagcatgtgatccctgtgacccacaccctattcatacactccctcccctttgaaaatcactaataaaaacttgctggttttgcagcttagggggcatcatggaacttgccgacatgtgatgtctcccacagacacccagcttcaaaatttctgtcttttgtacactttccctttatttctcagactggctgacacttagggaaatagaaaagaacttatgtgaaatattaggggtggttcccctgatacagaaaccttacaagctataaagattggaggccaatattcaacattcttaaagaaaataatttccaaccaagtatttcatattctgcaaaattacacgttataagttaaggagaaataaaatccttgtcagacaaacaaatgctgaagaaatttgtcaccaccagacctgccttgaaagaactcctgaaagaaggactaaatatagaaaagaaaaagaattaccagccactgcaaaaatacactgaagtacaaagactaatgacactgtgaaacatcaacaagtctgcaaaataaccagctagaatgatgaaaaggatcaaattcacacaaaactatattaaccttaaatgtaaatgagttaaatgcaccaagaaaagagacagaatggcaagctaaataaaaagtcaggactcattggtgtgctgtattcaagagacccatgtgtcacatgcaaagacacaaataggctcaaaataaaaaaaggaggaaaattcactaagcaaataaaagcagaaaaaaaagcagaggttgcaatcatagtttctgacaaaacagactttaaaccaacaaagaccaaaaaagataaagaagagcattacataatgctaaaataatcaattcaaggagcacccagattaaacaagcacattcttagagacctacaaaaagacttagattgccacacaacaatagtgggagactttaacacctcactgccaatattagacagataattgagaaagaaaagtaacatggatattcagaacttgaactcagctctgggtcaagtgaacctgatagatatctacagaactctccagtcaaaaacaacacaatacacattcttataagtgccatcttttagatggagtcttgccttgttgcccaggtgaaaatggctggaatgcaatggtgtgatctgagctcactgcaacctccacctccagggttcaaatgattctcctgcctcagtctcctgagcatctgggattacaggtgcatgtgaccacacccagctaatttcttttatctttagtagagatggggtttcaccatgttggccagactggtcttgaactcctgatcttgtgatccacccatcttggcctctcaaagtgctgggattacagtaagtgtgaggtgaagaagtcaggttctttgaataaaccagctctcatttgaattaatggagtgaaaactttctgattatcaaaaagatagtgtcaaggcatttatgaggtatttttccccttaacagacatgtacaaaactttctacttaaaagtcaaagaatacaaaatattcttatttgcacatgacgtattcagttaggaaatataacaagtcttattaaataataacagctgggggtagtggctaacatctataattccaacaatttggaagatgaaagtgagggagtcagttgggaccagaagtttgagaccagcctggataacatagtgagaccctgtccctacaaataataaaaaaattagccaggcatggttgtgaatgtctgtagtctcagctacttgggacgtttaggtaaaaacgtcatttgagtcaaggaggctgaggttgcagtgagccaaaattatgccactatactccagcctgagtgacaagtttgatcctttctcaaaatgacaacaacaaataaatttaaaaccaaaatcatacatgtgtgttttcttaacaaaactgaatgaaactagaaattaaaagcaaaagtaataatggcaaatccaagaatatataaaattgaaacacacaggctgagtacagtggctcccaacctctaatactggcattttgggaggctgaggcaggaggatttcttgagcccaggagtttgaaattagcctgggccacataggaaatccttatcaaaaaaaaaaaaaaaaagaaagaaagaaagaaaaagaaagaaaactaaaaaaacacactcttcatctcttcatcatattcttgctcaggggtcaaaaaatttaattgtgttaaaatgtcaatacaacctacagtggtgaacatattaagtatattctctataaaaatcacaatagcgctgggcatggtggctcacgtctgtaatctcagcattttgggaggccgaggtgggtggatcatgaggtcaggagttcgagaccagcctaaccaacatggtgaaaccccgtctctactaaaaatacaaaaattagccaggcggggtggcaggcacctgtaatcccagctacttgggagactgaggcaagagaatcacttgaaatgggaaggcagaggttgcaggttgcagtaagatgagatcatgccactgcactccagcctgggcaaaagagcaaaactccatcttaaaaaaaaaatcacaatggcacagttttattacagaaatattgcttaatattttaaaatttgattataaactataactagcaaaacacccatgaaaaagaacaaagagacattatactttctgattttaacacattaaaagttgcaataaaaaagtatgatacatacacaaaggaagataaaaagatgaaagaacagaatagagagcccagaaatgaagccttctgtatatgattacatgatctcttgcaaagttgccataagcacacaatagagaaaagatgatcagtcttctcaaaaaataatgttaaaaacttactatcgctttccatgctgacagcactcacacaaacatggcgaatgtccctaaaacccactggactttctgtaagaagtgtggcaagcaccaaccccacaaagtgacacagtacaagaagggcaaggattctctgtatgcccagggaaagcagcattatgacaggaagcagaatggctatgatgggcaaactaagccgattttccagaaaaaggctaaaactacaaagaagattgtgctaagtcttgagtgcattgagcccaaatgcagatcttagagaatgctggctattaaaagatgcaagcattttgaactgggagtagataagagaaagggccaagtgatccagttctaaagtgtcatcctttattatgaagacaataaaatcttgaatttatgttaaaaaaaaactgaatatcaacactgataaaataaagttacatcatttccttgaaccatatacaaaaaatttacaaaaaaaatacttaaatgtgttgcaggccaaaaaagtgagggtcatgatccatgatcaactcagtgtaccactggaggctatatgagtaaacagcaagctgttctcatgaatgcagaatgttggcaaaccgacaaactgcatgtgccacccagaggttatgctgagggcagtcacaccccaggcacaaatgtttcatgtgattaggcatacctgaagtctaatagcaataacgagaacctgtgatcaatcaagagctgaccaatcattacctcctcctccctgctctttctaccctgtgaatttggggatctgtggaagctcagggcagctgcccttgctcactagaagctgggagccctcttcttcttccccagaccctttccttaaagcatattgctttttccttggttttcatttcttcattcatcctccttcgttcagtcctgcagtaaccgtggcaaaccgtggcaagtggtgcccaacgtgggacttgatgaagggaactgcagggtcatacagggacttgcagggaactgaaggaacttacaggacctatagggacccatagggacagtcgagggacagataggaaaagataaagactagcagagacttgctgggacagaacagggacagaatagggacagagacagatagggtcctataggagcttgaacaaggaaggtctgcaggagcagaaaaagaagaaaaaaaagaaaagaaaaaaaattaaaaatgaaactgaccaggtgaaggagaaaccccttacgagtatgccggcagcgatataccctaaagaggtattggtcagtgccctaaaaggtacatagaatggaaagtttttgaatcagggtaacatgggggaagaatttggctatttcttttctcttttctgtttggagtttggtttgtactgttcttttgtcattgttccaaaatttaaaagaattttttgccctacccacagcacctatcgagggtggtgaacagaagagggaggatgaaaattggcttgtattgtttcttttgtggttgcagaaatgttaactttaactttggcttttgaaagtgcaaacgtttattgtggatgtgcactggcacctgtgagatgtgcagagagcttgggaaattttctcagagcctgtcaagatgtgagaactgagcttcatcgctctacaatgttggttcaagcaatggctaatttagtagttgataaatctaaaaagagccaagggtcaaactctaaacgggggaaatactataagtgtagaaagattggacatttcaaaaaagaatgccatcagatctctgggcagaagggatttgataatgcagtttccctctaacagaaaaaaatgccaggcctttgcccttgttgcaattaaggaaatcattgggctaatcaatgccactcaaaatttcatcaaaacaacacccccctgtcggggaatgagaaagggacctggacctgggcacctcaaacaatgagggcattccccgtccaggccacaactccatttcaggggtgggtttccggaggagcattgattccctctccccaggaacacctggaagcgcaggattacatctcccagccagagaatgggttacattaattgaaggagaaaaacccaataagatgcccactggtatttgggtacctttgccaataggatatatgggattaattttaggtagaagtcatcttaacttacatagcattgttgtagtccctggagttgttgattctgattgtgaaggataaattcaagtagtggtattgtcacaagatctttgggatttttaactagaatataatgctcaactgttgcttattccctgtaaattgatctttgggtttttgaactaggagatcaactgttgcttgttccatgtaaatcgcacccatcttcacaaaaggagaaaggagggaattaaggatttggaagtacaactacatgggaaatttatctatcacaacccatagcatgtaatagacccacctgtacagtgcaaattaaaggaaagagtttttatgggcttatggatatgggagctgatgtgtcagtaatatctaaaaataattgggccctatcttggcccttaaaactaacttctacatccctagtgagaataggagcagctcaaagtgttcaacagagttctatcctgtctcggaccagatggacagttatatacttttcaaccttatgttacgaatatagctgttaatctatggggtcgagatttacttacagcatgggatatgagacttacaaatgaaactattgataatccaggatttaaatgttaaagaaaatgggatatcagaatggaaaagccttaggaaaatccctacagggaaaccctgatctaatatcaataactggacacacagatagaaaagggttaggacatcaggacttctgatggggaggtcattgatatttctcctccacctactgctttgccgctagagtggctgactgacaaacctgtatgggtggatcagtggcccctatcacaggggaaactgattcaactccatcaattagtaaaagggcaattggaagcaggacatatagaagagtcggttggcccatggaattcaccagtatttgtgattcctaggaagtcaagaaaatggtgattgctgcatgatttgagagctattgatgcacagattaaaccaatgggtgcattacagcaaggtctgccatccacagcagccattccaagagactggccttaagtggtaatagatcttgaggatctattgtttttgctgtactgttgcacgagaaggatgggcctcaatttgttttctctgtgccttctgttaatcagaaagagcctgtctctcattatcaatggaaagtttaccccatggcaattagccaaagaggcagaagctgagttagaaccacaaaagcctttgcttttgttttggtagatttattaatgtggggacgagagtattcgtgcgtctgtaaaaagtaaagtagaggttcctcttcagagactttcctccccatttaggaataaataataatttctcttagaagcaaaatttattcaaagacctgtgctaacattcttaaatatctgctagccgtgataaagtaatcaatgtactttatgttcttagctctcacaatgtagcctaaatatttgccctgacatgcttacactagtccaagcaagcattaggtcatagcctgttcctcttccttatttgaaggtgtttttacctttctcagcattccacaagttacttcctccttcctttgttctcctctgcctttgactcttttaaaaaattctaagttgctaaacaattgggacacatacagaatgtgaggtcccattccggccaatggaaaccaaacacagcagtagggtggatgcatcaggttataaatgaccctgtctcctttgtttggtatactctcatggcaaaactgccggtgagtgtcccctttctgcaggaagtaaaaatggccttgctgaataaattaaatttatgttcaaatgctatttctttatggcaccagggaacaagcatttcaaacatatctttacaggaaatgaacaaaccgtgtgggtgccctcaggaacaaggttccaactggagtcatgctgacattaaccctcataacataggaacagttcaagaaaaccacacaagaagctgataaactgctggagtgccagggtcaggcaaaaactcctgactccatatttgtggccaagctggctgtaattttctgtacatctgtaagatcagctggaccaccagctggcagttgagggctgtacagtctgaattgccttttttcaactaaaaacaggacgagatgttacaggccaaaaaagtgagggagggttgtgatcaactcagagtaccactggacgctatatgagtaaacagcaagctgttctcatgaatgcagaatgttggcaaactgacaaactacatttgccacccagaggttatgctgagggcggtcacatcccaggcacaagtgtttcatgtgattaggcatacctgaagtctaatagcaacaatatgaacctgtgatcaatcaagcagctgaccaatcattacctcctcctccctgctctttctacccagtgaatttgggaggctgtggaaactcagggtggctgcccttgctcactagaagctgggagccctcttcttctccagaccctttccttaaaagatattgttttttctttggttctcatttctttgttcgtccttcgttcagtcccgcaataaccgtggcaatccgtgacagacatgcggccgggtgctgtggctcacgcctgtaatcccagcactttgggaggttgaggcgggtggatcacctgagatagagagtttgagactagcctgaccaacatggagaaaccccgtctctactaaaaatacaaaattagccaggtgtggtggcatatgcctgtaatcacagctactcaggagactgaggcaaaagaatcgcttgaacccaggaggcagaagttgtggtgacctgaaatcatgccatcgcactccagcctgggcaacaagagtgaaactccatctcaaaaacaaataaaaaacttaaacataaaaaaataacaaatcccttagaaaaaaatagaaaaaagagatgatataggtcttggcaccattttcttagaaatgacattaaatgcatgaacaacaaagaaaaaaatagaaaaatgtaagcacactatattcaaaatttctgcacactcaaaaaaatattcagtagagtgaaaaatgccctctagtaaacaagtgaaaatatttgcaaaacacatgtgataggagttaatattcagaatatataaacaactcttaaaattgaacaataaagctaaattgatttagaaatgagcaaataattgaacaaaattttcatcagaaaagatacacatatagaaaaaaacatttgaaatgacacagaaaattaatactttgtagagaaacacacaaaaataatgaaaaaattgcctcacacccattacaatggccactataaaattttaagcacaccaaatctgttgatgatgcaataaaaatgaaacctatgttgattgttagtagaaaacaaagataccgtcattatttttaaatgtcatgtttctcaaataattaaaaatggaattatcaaatatagcaatcccatttatgaatctatagtcaaaatatgccacacaagacaagaagacctatttgaacatcgatttattcacaaaagccaaaaggctgaagcaactaagatgtctcttgatttatgaacacatcgaaaatgtgacatatacatacagtgaaatattattcttaagaaagaaaatcttgtcacattttaagataagctttccaagtattatgtcacctatataagccagaaacaaaatgatggatgccgtatgattccacttacatgagatatcctaagtagtcacacttataaaaacagaaattggaagggtgtttgtcaagggctgggaaaagggtacatgcgttgttgttacttaatgggtactgggttttagtttcacaagatgtaaaactttcagaagtcttttgcacaacaatgtgaatatacttaacatgcttgaaatgtacagattggttttgagacaggttctcactctgtcacccaagctgaagtgaagtggcacaattaaggctcacttcagcctcaaatttcaaggctcaagtaatcctcccctctcagtctcccaagtagctggaaccacaggtgcacacgatcatacttggttattttttaaaaaaattttgtaagaaggaatcttcacatgttgcccaggctggtctgaaaattttgggttcaagtgatcttcctgtctttgcctcccaaatttctgaaattacagatgcgagccacccacatgtctggtcctgaaatgtacacttgaacagatttaagatgctaaattttatgttgtgtgtttttacaacaattaattttctaaaggaaaaactgaaaataatactgaattataactctttccaaaaattaccttcaaatcccagaagtgtttctcttacacaaaggaaatatatattcaacattaaacgcactgtgaaaataggaaatggtgaaaatatttccatgactactcacttagacaagataaaacgaccattgaaaatcagctaagaaacaatatacacaagataaaccataaccaatattggggtcatatttatagataaacaaacacacatatataatctgattgtgatagacatatggctgatttatctcttaattaaacctcacattgacttaaagtgcacaagcagaattgcaaattgactacaattgtaatacataaaaacaaccccaaaacacaataagctgatgttaagaaacgtacacgaaaaaaaccactaatataaaactgcacaataagagacaggtttactgataaaatttggtatgcaacattagtaaaccattaaaaaagaatttgtctaactacagtatttgactgtaactgtgactcatcaaaggtaggtattttgaatcattggcagtaaaatttcagggaatatgcagtataattataaataaaatatcctgatgagaaactttttttttttttgagatgcagtctcgcattgtcacccaggctggagtgtagtgttgcgatctcagctcactgtaagctccgcctcccgggttcacgccattctcctgcctcagcctcctgagtagctgggactacaggcacccgccaccacatccggctaactttttgtatttttactagagatggggtttcactgtgttagtcaagatggtctcgatcccctgacctcgtgatccgcctgcctcggcctcccaaagtgctgggattacaggtgtgagccaccacgccgggcctcaagaaacttttaataaataagcatttaaaagaaactagtgaccgggcacggtggctcatgcctgtaatcccagcactttgcaaggccaaggcaggtggatcacctgaggttagcagtttgaggccagccaggccaacatggtgaaaccccatttctactaaaaatacaaaaaaattagctggatgtggtggcgggcacctgtaatcccagatactcgagaggttgaggcagatgaattgcttgaacttgggaagcgaagatttcagtgagttgagatcacaccattgcactccagccagggcaacaagagtgaaactctgtctcaaaaaaaaaaaaaaaagaaagaaagaaagaagcaagtgttaacttttcttttctttttttttttttttgacatggagttttgctcttgttgctcaagctgaagtgcaatggaaatgatcttggctcaccacaaccaccgcctcctgggctcaagtgattctcctgcctcagcctcccgagtagctggaattacgggcatgtgccaccatacccagctaattttgtatttttagtagagatgggatttctccattttggtcaggatggtctcgaactcctgacctcaggtgatctgcccgcctcagcctcccaatgtgctgggattacaggcgtgagacaccatgcccagccacgataacttttatgttttaaatataagctattcatacacgaaataaaactgatgtaatccaactttagaagcaaagaatagccttacattgctaaattttaaaaaatatattttgcaaaatataattagagcctctgatatattaaacaaatatttagcaataaattatgttatcatttagatatatggacgaaaataggtgaaaatcttatttttttgcctacagcaaatttaaatttataagtaacgattttagtaaatatggagtgtctaccaattatctaaattactttagacaaaacatgtaaattctcacatattgtcctaaatgtctgaatctaaaattacagataaatttgaaatagaaaatagcaagtaaaaatgtataggaaaagaaacatcagtaagatgaaaaaatgaaaagtgctctatttgcttatccctcccacagcaagaacatttctcagccattctttacataaattcctttatgagagaaccaggcatcatggctcaaacctgtaatgaagatatatggtacactgaggttggagaattgcttcaggccaggatttcaagaccagcctgggttataaagtgagacctcacctcaaaaataagtgcctttgagacagctttgatatttagggaggcagttgtgaaattctgctaaagcccaagattgaggagcattccttttcagagagcaggtcctcattctggtgggaaattataggacctctggtcttggctacagaccaagaaatggcccaaccaacttggtcacactgagaattctgaagttactctgtaaccgtcccaaacttctcccagttacagtctggtagagaccctgcccttccagagacctggagaaagacagccatttgtagccatgtaggcaggcctacagaccttggtttttactgtggtccctgaagcagttcaatgactctgttccagctccatgggtagcagttcatggccagttctgcctacatagaaacctgcacagtgacctgaggaaatcctctctggtactcagtgaaagccatactcatttgcatcctgatataagggccactatatatggacccgactgcagaaagctgccctagagtctgctccacagataaaagtcctgaaggatatttaatctgttaaaaaacaaacaacaacaacaacaaaaaaaaaaaaacagcactttgggaggccgaggcaggtggatcacaaggtcaagagatcaagatcatcctggccaatatggtgaaaccccatctctactaaaaatacaaaaattagttgggcatggtggcacgcacctgtagtcgcagctacttgggaggctgagggaggagaattgcttgaacccgggaggcagaggttgcagtgagccgagcaactccagcctgcactccagcctggagacagagcaagactcccatctcaaaaaaaaaaaaaaaaagaaaaaagaaaacaaatgggaattacaactacccaagccccttgtaacaagccatctaaatgtggaccctagagcagacccagcagcctggtgaccaagttacaacccaactccactacaaacccagagggcatcccagaaccctggggacccaacaaaagcagatctttacctcctgaaatcagtatatgaaaatataagttgtttgctttttcaaattcatggacaccaatataaaaaacaattgtgcccattatcaatgcttctattttaacacagcactggaagtatgtggcagaataatgaataaaaaacatttttaaaagccattgaaatcaaagacaagtaaatagttgctgtttgaggaatatataatcttatacataaaaaaccatagacagtacattgaaatttgtctaataaatacactcagtaaattaacaaaatataaaattaacataaaagtataagttattgttctatacacttaaaacaagctattggatacagtagaaataaaaaatattttactaattttttttttttttttgagacagagtcttgctctgtggcccaggctggagtgtaataatgtgatctctgctcactgcaacctccacttcttgggttcaagtgattctgcttgttcagcctcctgagtagctgggattacaggtgcccactgccacacctgactaattttttatactttcagtcgagatggggtttcatcatgttggacagacaggtctcaaactcttgaactcaagtgatccatccgcctcagcctcccaaagtgctggaattacaggcctcagacatggtactggccaagaaaacaatctttttaaaaatataattaaaatactaaatttctgagaacaaatataacccaagaggtaaaaaatcttaacaatgaaagctataaatcaatgaaattagagaagacacaaataaattttaaaatatttcatatttatggaaagaataaatattgttaaagtatcatattctctaatctatagattcagcacaattcccatcaaaattccagtgaaatttttttttacagtaatgaaactataattttgaaatttacaagaaactacaataaactttgaatagccaaagcaatcttgaggaaaaagaacaaagcagagggacatcatactttataatttcaaactatatttcaagaatatagtaataaaaacaggagggaatgtgcagaaaattaacataaaaaccagcagaacagagaccactactctcacacattttagacatgatgcaaaaagataactaaaataatagtttaacacaaagttctcaaaatcatgcagatatttgtgtgtcccccaaaacaatggaaaagcagtcagattgtgcagtctcttatgtgccatgaagaggactttggctctcactgtgaacttgaaggaagatcaacgaagggaaagtagaatccttagagaatttaaaggcataagacagaagatgaccctatgtgagaaaaacaaaacgaaacacacacacctccggcttcccagaaactatttgctttggaacagagcttcccaaatcacactgtagagactggcttttgtttttttttaatcttccaacctttcatctatgtcaactgtttcatttagtctcacctacctggggtgtggctaccataccgtgtctcttcatattccagggatcttttccttgctcctgacagttgatcagatctggcctagagaaaccaatacctgctttattaaaaataaataacatgaatcttgctcttattctttaattaccaacctagtaccgtgcttagtaaagaggatgtaatagaatattccagaaaattaatcccaaactactacttaataacagaaagttcttaacatttagaaaatattttaaatttgtagctccttaatttcactacccagtactcatgaatcaaaaataagtgctggcaaatagattttaacatatgggcaacaatattttatactactaaatttttgaaattaccactactctggagtgaaggatacagaccagcttgggaaagtaaaacgttcaggccaagataaaacatcttgaagaaatttttttctacagagataatttctcaagattttttaaaaacaaagatcagaaattcctgtatgcaaagcataaattaccaaaaattattcaagaaaatagagaaatgaaacttttagggtatataaggaattgtgtattagagttattctcacccaagaagaccaggtttctgtagttctctaaaatcactttcctatacaaatcctgttgagcagtgtccaggcattgccactcctccagagagaatttgatggccacatccctaaatgtcaacggcccctgaaaaacacatgcgtgcgtgcacacacacacacacacacacacatatttacaagtgtcaatgggcaaaatttatcatttgaattatggttaaatgagagagtaaagaaaatttgttctgacttataggaatgactaaaattatccaacaattttccacacagaaatattctctaatgtattctctaactctgtgagaagagaatggtataagatccacaacaccagggcatagatgatacttttatgaataataaagtataaaactaaaggcataaacacaaacatgtacatttttagcactatatttgcatcataaagaatgagttgtgtatatttttcagacaaaaaagacatgctgagttagaaggcacctctcaagttttaatatgtataataaactgaagatcttgtgcagattttttttccagaagatctggaataaaatctgagtttctgaatttctaacaagctcactagtaatgccaatgcgtttggctgaaaaagaatattttatcaaacatctagtaagtgaaagaccctgtgttttacccaatttttctggcctggaaacaaagacaagagtcttcattcttcaaagacaggtatttgtaaagaaaactaagaaagaaaggcagctgccatattaaatgtgatggtttatgcacagctcttctttagctacacaaagatacttaataataaagagaaaaataattaactctatagtgaaataaatatttcagagagctctttaagtaaattgtaaaatcaactgcactaggatcaatttttatgatgtgctgatgcacacagaagaacacatcaccactgctgagatattgcccctcaaaaagtacagtctgaacttaaccatacagaaaaatcagttttatgcagagttcaagatgcagatatcttctatgtactgtaatttttaataacaatttaaagtagtctttctttagcaccctagagagtgggtatctctcaataattttttttcagaactttctgggtaataaatgctatcctgtttaaataagcattttcttagtcctgtactgcatagagttaatggagaaaacagatgaaacctcaacattacatgttctctatttttactaaggaccccagctttcccccaataggaatcttgaatatccatattttcccatttcaacagcaacaaagggaacatttttaatagtgccgattatgaattcctggtaagaattccacatggcatataagaagccatgatttagagagtgtagagaagactctgggatataggagagaaatattttgcagagacccttgactatcacaagaatttttttaagtagttaaaacaaattcattgggggaaaagaaacacaagtagagaagtgaaggtttgcaaggacttaaatgcatggcactccaggaggcagagtggacacagctcttcatctgacacatgtttagctgaaaaaaagccatttttcctcttttgtcttctttggaaatcctttccagatgacattctctggagaagttacacctgcatcttgagaaaattcctttaaagttgtcagcaccacctgtttacctgctagtctcacacccacagaaaaaagaactaagacctgtagaaaaagcccacccatttctgtcctttataacagcagagattcaggaacaatgagctgctccatgaatataaaaatatgtttctttatttttgtcttcaggtgctcgcccttgccacaaacaccagcaatttctgctacagtaatggaaatatgggtgacactgacctctccctatcaaacccaaacagaacagactctgtgaccaccttttagtgtaaaggagaaacttaactcttatgaatgtatcttgaaccccacacacttgattctgtcctcaccttagagtcacatgagacacaattaaaacaatgtgaatactttcacctagaacaataaacagaacctgtggagagagcctgtggagagtaaagagatgtctccaaattggccacataatcctcatgagaatcctgggctgataatcacttaactaagccttgcctctcaagccttaatgagctcaaaaatcacttggtaatgttggccccactctatgtaacgtgattctgcaggtttggaaagggtccatggatgggtgtttcaaaaaaatcccctgtcaatgctgatattgctccccctgggctcattattagcattagttagagaaaacaggcacagcacagtgtcccttacactcagcactcttgtcacaacacaaatatttctggtacaaataaagacaaaataacttcatcttaaagtatcatattctttgctggctccttaaagtttacagaggacacagaaggcaacaatgtctgaataagtctgcatttaaaaaacaacaggtacacatgaactaatgcaatgcttattaagtggcactatgttctcaagagtatgtaacagagcactgtgctgggaataacacactatgtgattaaatcctaataacaccttgagagttcatactaagttttcaataattctcaggatttagataaagggcccagaattattatttcttcctgtttctcaatcaccaattttaaccaataaactaaaagctaaatatagacagatgaagatatataaagaaataaagacataaaaagagtttaatgtagtttagagaatttttttgtttatatttacttgtttatgacttgcagagcaactactggatccgcaggaatagaaaacaagttgctaaatggaatgtttctgtaagcactggttttactacaaaatttagaaattaagatcttaaaatgtatactttacttttcttatgtatctgcttttggatttcaggatattgtgagcaaccgctctagaaagtcagcaggatttaacagccaaaacttgaatctttataaatcagttttgtaaggaaatactccagagttgggacagacctacaaggtctccaaaaagggtgaatctgatcagaactggggcagggagaggaacctatgtaaaatttgttctttatgccactggagtatttccagttctgtttttcctaagcttacctaagagaaacttaaatcccatagtttacgtaactttcatctatttttgccactgccctgtcaattttataacataaactaataaggaatttaaatgaatcttttaaagttttctaggataattttattaggagttaaatatgtattcttagaaaagtaaaacaaacccaaataacaacaacaactcttcagtccataaatatcccttcagataataacatcagaagtcacgccaatattaaaaaaaagtggctcaaatttttgtgtttttttttttttgcaaacatctattcaccgtactaataatataatgcttaattcaaccatgtattcagttgctagtctagactaaaagctcctagatggtagggaccatgactgcttcatccattttttgaatgaccatatgaaataaaagcaattagtttatttgtttgagtcacaagacctcctctttgtctttcacccaagtaccagaaaacttgagaaactctcgtctgggtaacaaccaaagttatctctcgtatgagggagaaaaaaacacaggatgattcctttctcttacaccaagacagaagcagaagaagagtgattacactcttgtcagcctgacacaattctgccctggacatcctcaaatgtctttaaaacacctaggtgattgtgagagggttcgcagtgacccagggctgatggcccagtgataagccaggctggagaaactcaggctgattctaaatagaaaatggaactgccatggtggagctccagaacctggatcacctatcctgatttgtgagcccttgggtatgaagaaggacaagaatactgtactccaatatcagaatttacaggtaagtatcattgtggtcatggctctggatactttgtggccttgatttctcactcttaagatgcttgtttatactcatggattctgtcatcagattctatttacacctggagcctctcacaaactgtagcaggtcactgaacaagattgaaaagcttaaagagccacactctcaaaggggagctttaagatgtctatgctgacatctaacaatgcagaaaatgccttctgttggttttcagtacattctcaatccaaagtacagccctgtcttgtaaatcccaggcagaggccagaccttatgtgcagattctaggtgggatcaacgggactctgcatccttgggtgttacagcaagcacagtacaatcaaaggggagattccttcatacaggctgctctagcacattctaagtaacacgtctacctaaaaggaaaaaactgaggcaacataaatataagtagagagttaatctaggccaagcttgaggattgtaaccttggagcaaagatacatcctccaaagactgaacaaataagaaattgaatccccgaatatagcaataacaagctccaaaactgaattagtatgaaataccctacccaccaaaaaaaaaaaacaaaaaaaaaaaacgaagaatgagacaaatttacagacgaattctaccagatgtcaaaagaagagctggtatcacttctactaatattatttcaaaatattgagaaaaagggactttttccccactcattatataaaaacagcattattctgataccaaaatctggcaaatataaaacaagaaatagaaaacttgaggccaatatttttaatgaacattgatgaaaatattctcaacaaaatactggaaaaccaaatccaggagaacatcaaaaagctaatccactatgatcaacttggctgtatctctgaaataaaaaattggttcaacatacaattaacaaatgttactcatcacataaacagaactaaagacaaaaaccacaaggttatttcagtagatgtttaaaaagctttcaataaaatttaccatcctttacgtttaaaaccctcaaaaaactaggcattcaaggtacatacatcaaaataatcagtcatctatgtatggcaaacttacagcaaacatactaaatggacacaagctggaagcattccttcatgaaaactggcacaagacaaggatgctttctctcaaaactcctattcaacatggaattgaaagtcttggccaaaacaatcagggaagagataaaagacattcaaacgggaaaaaagaaagtcaaactatattatccctatgtgcaggtgataagatgctatatcttcaaaaccctacagtctcagcagaaaagctctttaaattgataaacaacttcagcaaagtttcagggtactaagtcagtagcatccctgtacatcaacaatatcaagccaaaagccaaatcaaaaacataatcccattcacaactgccacaaaaagaatagaatatctaggaatgcagcaaaccagggaagtgaaagatctctgtgacaagaatgaaaatatactgcttagagaagtcagagatgacacaaacaaatggaaaaccattgtatgcttatgaatagaaaatattaatatcattaaaatggtcaaacagcccaagaaatttactgatttaatgctattcctatcaaactaccaaaaacattgttaacaaaatgataaaatattttaaaatttgtatggaaccaaaataagcctgatagccaagtcaattttaagcaaaaagaacaaagctggctggttgcggtggctcatgcctgtaatcccagcactttgggagtctgaggtggatggatcaggaggtcaggggttcaagaccagcctggccaacatagtgaaaccccatctctactaaaaatacaaaaatcagctgggcatggtgacgcatgcctgtagtcccaactacttgggaggctgaggcaggagaattgcttgaacctgggaggtggaggttacagtgagccaaaatcacaccactgtgctccagtttgggcaacagaatgagactctgtctaaaaaaaaaaaaaaaaaaaaaaaaaaaaaagaatgatgctggaagcattgcattgctcctcttcaaactacactacagtaaccaaagcgacattatactggtaaaaaacaacaacaacaacaacaaaaaacagactcatagaacaatgcaacagaatagagagcccagaaataatgccacacacctccagccatctgatatttgacaaagctgacaagaggaatgtaaaaagaatttcctatttaataaatggtgcagaaataactagctagcactgtatagaagattgaaactggtccccttgcttacatcatatataaaaatcaactcaagatgaataaaagacttaaatgcaaaacttaaaaaaaaaacctgcaagataaataacctagaaaataccattctaggcatagaaactagcaaagattacatgataaagataccaaaagcaattgcaacaacagcaaaaattgacaaattgaacctaattaaattaaaaagctttttcacagcaaaggaaaatatcaagagactaaccaatctacaaaattaaaaaaaatgcaaactattcttcttacagagatttaatatacagaattaagaaacttatgccaggcttggtgagtcacgcctataatcccaacactttcgaaggctgaggtgggtggatcatgaggtcagaagttcaagaccagcgtggtcaacgtagtgaaaccatgtctctactaaaaatacaaaaattagccaggtgtgggggcacacacctgtagtcacagctactcaggaagttgaggcaggagaatcacttgaacccaggagtcggaggttgcagtgaactgagaccacaccatttcatttcagcctgggtgacagggtgagaattcctctcaaaaaaaaaaaaaagagacttaaacaactttacaagaaaacaatatactacctcattaaaaagtaggcaaaaaaaaaagaagagatgcttttcaaaacaaatatgtgactaacaaaaatatttttaaaatgctcatcacagctgggcatggtggctcacacctgtaatcccagcactttgggaagccaaggggggtggatcacgaggtcaggagtccaagaccagcctggccaagatgggtgaaaccccatccttactaaaaatacacaaatacaaaaattagctgggtgcagtaccaggtgcctgtaatcccagcttctcaggaggctgaggcaggagaatcacttgaacccagggggcagagtttgcagtaaactgagatcatgccactgcactccaccctgggcgatggagtgagactccatctcaaaaaaaaaaaaaaatgctcatcacattagagaaatgcaaaaagaaagaaagaaaaaaaaagcctacaatgagataccatctcacaccagtcagaatggcactgttaaaaagtcaataacaggttgggtggggtggatcatgcctgtaatcccagcactttgggaggctgaggcaggtgaattacttgaggtcaggagttcaagaccagcctggccaacatggtgaaagtttatctctactaaaaatacaagaatcagtggggcatggtggtgtaaatctgtagtttcagctacttgggaggctaaggcatgagaatcacttgaacccgtgaggcggaggttacagtgagcaaagattttgtcactgcactccagtctgggtgacagagtgagactgcctcaaacacaaaagttaatagcagatcctggcaaggtttcagagaagagagaatgcttatacactgctggtgggagtataaattagttcaactattgtgaaaagcagagtggcaattcctaacagaactaaaaacagaattaccatcttccggcaacctcttaattgggtgatgtaattcatgtctaaattgaataactctctttttctcacttctgtagtatgcttccccctgcacagatctccccctactcacgaaatgcttttaaggaatcagacacccattggtctctgtgattctttaaaaatcccacaacattttctaggaacttgcctgggattgcagatgacagatttactgtctcctttgcctgtgggactagagccccagggccaggggagacctggcatccaaggtgcactgtgtgggagctccacccagatgtaaaccagctcttcccacatcccagcatcctgcccagcagcacaacagaactgaggatggggctgcaggatgataccagcacttcaggagctgtggtaaggagcaagggcccaaggcagggaagcccgtcccataaggatgaaggggagcttcatcacctcctggggaatgaccactaatccaacccagagtggttgggggcagcaggagtggcttgccaatttggatgaaacttgtgtccccactaacaaagtgaaagtggttcactggatctggagacaggaactggaaaaagggaggaaaggggccaatagaacagcaagtgcagcaaagtagagcttgctggcaaggtggcaagaatggcttgccaccacaactgggagtgtgtgggtgcatgtgaacccacccaggacatgagaggggttcgtttcatctgatgaggagtcctggggcaggggaggtgtgtgaaagagactgtctttggagaggccaacacggggagtgatgtggggaggcacagaacccttagcacgggctgtgtgctccaaggtaagagcaggggaaatcagacccaggatactgcatatggctgataggaccagttccacagctgcagcaggctgtgacaggggaaggcatgttcctggctaagcattgtccaaaactcctgtaataggacctgatctggtggatctgagagtgaaagtgagagcaaaagtgtgccccaagggaggaaatgggaggaaaagcatcaaaattgactcctttggaatgcatgataaataattttaaaaaaggatttagaggtgattataggattgaacttgatgctcaaaaattaaggacatactgtgagatagataggcctactttcaaagtggggtggccccctgaaggtacaatagacaggaaattaattggctatgtgtttaaggtggtcactggagttggaggacaaccaggatacccaggccagtttccctatgtagactcttggcttaatgtgccacaaactcaccccaagtggctacagccctgcctatgatattgcaaggcattagtggcttggggcagcccaaccaaaggaagcagaggaacctaaagtccctagcatctcccaggaaaaggaatccccaaagcctcagctgaaaccagttcttcaggccccacctgaggaaatgggatgtctgccccccatatgtgccagtctacctgtttttggcaagaatacacaggaggcagagttgggagcatctgaagagtcgggctcggaggaaagtgaggctcagtctccccaccaagtggaacagaagcccccattagaaaaaaacaaagaagatggaaagggtgatgcagctaggcacctctgctctggccaaccatgggctttgcagatgccactttgagagaccaggacacaagtttttgatgaccaggggcagatagaaggtggtcctaggcattatgttcatcagcctttctccactactgatctcttaaattggaaacagcacacaccctcctatacagaaaagcctcaggctctcattgatttggtgaattctattattatgacacataatccaacctggccagattgtcaacaatttttgctaactttatttcatacagaggagcataggagagttaatcaggcagctctcagctggttagaaaaggaagtcccagaggccacccctaacccatgccagttcgctgaggagcaatacccaaatgatgaccctaactgggacccaaatgaggcaagggacattgaacagctgcagctatataaaagggcactcctgaatgggataaaagcaggaggaaggaaagcaatgaatatgagtaaaatatcagaagtgcactgaaagcccaagtgcattcaatgaaaggctttgtgaggtatataggctgtacactccaattattccagaggctcctgaaaaccaaaatatgacaaatatgacctttgtcagtcaagcacagggagacataagacaaaagcttcagaggctggaaggctttgctggggaaaatattagtgaactcatggaaatagcaaacaaagtatacataaactgggaggaagaggcagagagaaaggaagaaagaacaaacagaagtaggaacaaggagacagcttaatttatagctgctgcactagcagaaagtaaccctggatttgctagaaggcatggccaaggcagaggctgaggaaggaagcaaacaagactgggagaagaaagctggacctggttggacaggaaccaatgtacaaggtgcaggcaaatgggccactggaaagatgagtgccctgaataggaaaaggatggaaatgatggtcaatggtctaacatctgagtgcagtatttggttgctagtcatggcacctcaaaggcagatcccgatctgatcggcttagcaggggccaagaattttgaggactgagacagactgggctccatctttttaggggagcctatggtctctatggaagtagggggtggttaatggattttttggtcaatactggtgctgatttctctgtggtaactcacccaattagccccccctaaaaataactgtgctactatcgtaggggcttccagggccaaagaaaagagacctttttgcaaatccaggagatgtgttattggagaacaggaggtgcagcacgactttctatatatgccaaattgcccagtgcccttgttaggaagggacttactccagaagctgcaggcacaaatttcctttacacctaataggaatatgacccagagatagggaagccaaaggcaatggtattgactctaattgccccaagggctgaggaatggtggctctaagaactgtgtacaggaggctgccagagccagacctacacaatatgcaggtaatacggggtaatatgtgggtaatatgtgggggctgaggacaaccgccctggacttgctctaaacagaccccaatggtagtagagcttaaccctcatgctgccccagtacaagtccatcaatacccactaccctgagaggcaattgatagaataacaaagcatctaaattggctttatatgcatgagattatagcaaaatgcaagtcctcatggaatactcctctgttacctgtgcgcaaaccaaatggggaatacaggccagtgcaggatctctgggcagtaaacaaagctgctgtcactattcatgccatagtgcccaacccatatacaatgctgggacagattcatgctgatgccacttggttcatgtgtctggacttaaaagatgccttcttttgtttgaggcttgctcctcaaagtcagcctgtatttgctatccagtgggggaaatcacaatatacctggacaaggctgccacaagggtttgagaattctaccatttttgaggaggccttggctacagatcttgaggcttttttgccacctagtgacaattgtgtgctattataatacattgatgacttgttattcactgcccccatgagggaggaatgcttccaaggaacagagaggcttcttcacctgctacgtgaagctggctgtaaagtgtccaaagacaaggcacaagtctgtttttgagaggttggatatctaggattcatggtatcccaaggccaatgcaggcttggaagtgcatgcaagaaggctgtatgtgcattatcaaccccagttacaaggcagcagggaatttctaggcatggcgggattctgctgaatctggattccaaacttctcccttatagcaaggcccttatatgaggctaccaaaggtgggtaaagagagcccctcctatgggaaaaggaaaaggaaaaggccttcaagggtataaaggaagctctcatccaggccccagcactaggattgccagatataaaaaagcccttctttttgtatgtggatgaatgaaagggaatggcagttggagtcttaactcagttgttgggctcttggcactggccggtaccatacttatccaaaagactggacttggtggccttagattggccctactgcctcagggcattggcagctaccacgacccttatagaagatgccaacaagctagccctaggtcagaagttaataattcaggtgccacacactgtagtcaccttaatggagcaaagagaacatcgttggctgtccaactctagaatgctgaagtatcaagggcttctgtgtgcaaatccctagacaacattaagactgtaaataccttgaacgcagctaccctgcagcctatggaagaacctgattggaaggatggtgagttacctcactgctagtaggaccttccccactgttgcataaatacagtgggcaaagtgttctcaagccaggaagatctcagagatacccccttggagagcccagatgttgaatacttcactgatggtagcagtttcataacacatggggtgtgatatggaggatatgcagtagtgacacaacacttggtggtcgaggctcaagccttaccttctgggacttctactaggaaggctgaattaataacattaactagagcacttttattggccaaggggaagaaagtaaatatatatacttctcaaaatatgcttttgcaactctgcacacccatggggtgacatacaaagagagaggactttagactatgagaaaaaaagaaataaaaaataaaaaggaaattctacaattattagaagccttatgggctccagagaaggtggctgccattcattgcagaggacaccaaactgggaaaagctataaggttcagggcaacagaaaggtggacccagaggctaggcaggcagcaatgaacaaggctttacctgtaaaaagaactctagcaatgcctctccttatagagccccctttgccagaggtacccaattactctttaagtgaaaaagcttggtttaggcaggaaacagggaagtatattaaaagtggatggtggctgttctctgatgggaggctagccatcccagagacaatagccccaaggtttgtgaagcagatccatcaaggaacacacattggaaggatggccctagagactgataggttgacacttctatgtgccacagctctctgcaaccacctgtgctgtttatgaacaatgtatgtctatcctgtgccctgaataatccaaaataagaacccactcaacccccaggaattcaggaaatgggagctgtgccttttgagaacctgcttgtagactttaccgagttgcctcaagcagaatgttactggtatatgctagtgtctgtttgcaccttctccaggtgggttgaggccttccctaacagaactgaaaaggcatgagaggtgacaaagctgctactaaaagacatatagcaaggtttggatagcctttaaccataggatcagacaatggtcctgcatttgtggcagaagtagtacaacagttgactcaacattttttttttgtatttattgatcattcttgggtgtttctcggagagggggatgtggcagggtcataggataatagtggagagaaggtcagcggataaacacatgaacaaaggtctctggttttcctaggcagaggtccctgcggccttccgcagtgtttgtgtccctgggtacttgagattagggagtggtgatgactcttaacgagcatgctgccttcaagcatctgtttaacaaagtacatcttgcaccacccttaatccatttaaccctgagttgacacaacacatgtttcagaaagcacagggttgggggtaaggtcatagattaacagcatcccaaggcagaagaatttttcttagtacagaacaaaatggagtctcctatgtctacttctttctacacagacacagtaataatctgatctctctttcttttccccacacttcccccttttcttttcaacaaaaccgccattgtcatcatggcccattctcgatggttgctgtctcttcggagctgttgggtacacctgcagaaaggctgttgcttcacacttggaagattgaacagcggccaggcagaggtgctcctcacttcccagatggggtggcggccgggcagaggcactcctcacatcccagatgatgggcggctgggcagaggcgctcctcacctcccagacggggtggccgggcagaggcgctcctcacttcccagacggggtggccaggcagaggtgctcctcacttcccagacggggcagctgggcagaggcgctccacacttcccagacggggtggccaggcagaggtgctcctcacttcccagacagggcagccgggcagaggtgctcctcactttgcagatgaggtggccaggcagaggcgctcctcacttcctagacagggtggcagccgggcagaggtgctcctcacatcccagacaatgggcggccgggcagaggtgctcctcacttcccagacggggcggccaggcagaggcactccccacttcccagacagggtggccgggcagaggcgctcctcacttcccagatggggtggctgctgggcagaggcgctcctcgcctctcagacggggcggccaggcagaggcactcctcagttcccagacagggcagccaggcagaggtactcctcacctcccagatggggtggtggccaggcagaggcgctcctcacatcccagatggggcggccaggcagaggcactcctcacttcccagacagggtggcagccgggcagaggcattcctctcatcccagacggggcagcaaccgggcagaggcactcctcacatcccagacggggctgccgggcagaggcgctcctcacttcgcagatgatgggcagccgggcagtggcgctcctcacttcccagatgatgggcggctgggcagaggtgctcctcacttcctagacggggcggccaagcagaggtgctcctcacctcccagatgaagggcggccggggagaggctctcctcacatcccagacgatgggcggccgggcagaggcgctcctcaccccccagacggggtggccgggcagaggcgctcctcactttccagacagggtggccagccagaggcgctcctcacatcccagacggggcagttgggcagaggcgctcctcacttcccagatgataggcggccgggcagaggtgctcctcacttcccagacgggacggccgggcagagatgctcctcacctcccagacagggtggccgggcagaggcgctcctcacttcctagatggggcagccaagcagaggcactcctcacctcccagatgaagggcagccggggagaggctctcctcacatcccagacgatgggcggctgggcagaggtgctactcacttcccagacagggcagctgctgggcagaggcgctcctcacctctcagacagggcggccgggcagaggcgctcctcagtacccagacagggcggccaggcagaggcactcctcacctcccagatggggtggcggccgggcagaggcgctcctcacatcccagatggggcggccgggcagaggcactccccacttcccagatggggtggcggccgggcagaggcacttctcacatcccagatggggcggctgggcagaggtgctcctcacttcccagatgatggacggctgggcagaggtgctcctcacctcccagacagggcggccaggcagaggcactcctcacttcccagacggcgtggccaggcagatgcactcctcacttcccagacggggtggcagccaggcagaggtgctcctcactttgtagacaggatggccgctgggcagagatgctcctcacctcccagacagggtggcggccgggcagaggcactcctcacctcccagacgggttggccgggcagaggggctcctcacatcccagacgatgggcggccaggcagagacgctcctcacttcctagacagggtggccgccgggcagaggctgtaatcttagcactttgggaggccaaggcaggtggctgggaggtggaggttgtagcgagccgagatcacgccactgcactccagcctgggcaatattgagcattgattgagcgagactccgtctgcaatcccagcacctcgggaggccgaggcgggcagatcactcgagctcaggagctggagaccagcccagccaacacggcgaaaccctatctccaccaaaaatacaaaaaccagtcaggtgtggtggcgcatgcctgcaatcccaggcactgggcaggccgaggcaggagaatcacgggagcccgaggcagggaggttgcagcgagccgagatcacggcagtacagtccagcctcagcaacagagggagaccatagaaagaaagaaagaaaggaaggaaggaaggaaggaaggaaggaaggaaggaaggaaggaaggaaggaaggaaggaaggagggaaggaagaagagagagagagaaaaaaagaaagaaagaaagaaagaaagaaagaaagaaagaaagaaagaaagaaagaaagaaagagaaagaaagagagagagagaaagaaagaaagaaagaaagaaagaaaggaaggaaggaaggaaggaaggaaggcaggcaggcaggcaggcaggcaggtgactcaacttttaaagatcaaatggaaactgcacacagcttactgaccacagagttcagagaaggtggaatggataaactggacactcaaacagctactaaaatagttttgccaggaaactcacttatgatgggatcaggtcttgcccgtggtcctcctccaggtcaggtgtatgcctagaaaacaaactggatattcgccctatgaaatattgttcagaaggccacccccaatcattaatccaattagaggggatttaaaggagttaggagagctaacccttagaagacagatttaggctttgggagtggcaatgcaggaggtgcaaggctgggtaaaggaaaggatacctataagtctaacagacccagtgcatccacataagctgggagactcagtctgggttaaaggtggaatccaacaaccctggggcccttataggatgggccctatattgtgatcatgtctggtcccactgctgttaaagttccaggtgtcacaccttggattcaccatagccggctacagccagtggcagcagtaactctcaatgacaatcagtggattagccaacaagacccagattgccccacccgaatggtcctatggtgaaacccaactaccagtaagaaggacaactgccctgctctgaccactctggaggctggtcagtctacacacggctgaagcttgaggatcctgcaagctctgctctagtcacatccaggaagctgactagtctacacatagccaaagctaagaggaccatctctggataagtaaatgtggatacaatttataagcctagttataatcctgtcaatactgattgttctgttgttatgttattactgcaaatgcttcaaatgtctatacccagaggaaggtttgccatgcccatgtgtagtgtaagcatgtttctattacatacactaatgttgttaccatttctgcatatactaaaagaggaactcttaggatatccagtttatgattaaaataaaagaattagaagaagcataatcacaaaaatagacacaaatatcaaaaaggatgtggtcataggagactggaaagataatgaatggcctactgaaagaatcattaaattctatgggatggctacctgggtgcaagacgggtcatgggggtaccatacccccatctgtatgctcaagcacatcataaggttgcaggaagtccttgaaatcataaccaataaaacatcaagggcactagatttattggcaatacaagcaacacaaatgaggaatgctatgtatcaaaatagattggctttagattacctcttagccttggaaggaggagtatgtggaaaatttaatttaaccaactgttgcctagaaatcaatgatagtggctgagctctcatggaaatcacagctacaatgtgcaagttggcccatgttccagttcagacttggttcagttggtccctggattccttgtttggaggaaggttctcagcctttcgaggattcaaaaccctcattagtgggttcttacttactcttggcatctgcctcatcctcccttgccttttacccctgtttattaggagcattcagtcaactacggaggcaatagtggcctgacacactatcatgcagttggtggtatttaccagatatcagctgctgccaatcgaagaagaagctcatctccacgaaaaggtggcaaatagtagtgcttcctattaacacctctgttataaaaagcaccaaaaaggggaatggaacaggaattgaaagaaattaaagtgtgtaagcagaaactcagttgtatgtaagaaaacctaactcctcctgagaaagagaaagagctggagtcctttaaaaactaactgcctgtttttctgtggctagtgagctttatctctcctgccttccaaggcattgtgaagactttgttttcctagctgtgcagctgctaggtcactagacagatacactcaagttgcaaaacatgtttttccttgaaaagtaagaaatgatgtaatgcatgtctcaattgaatgattgtctttgtttctcacttctgtagtacgcttccccctgcacagatctccccccactccacccccatgaaatgcttaaaaggtaacttaactctttgttcggggctcagtcctttggatgttaatccgactgggccagtgcacctaaataattataaatatcctcctgaatcccatcggtctctctgattccttaaaaatcccacaacatgggtatatacccaaagaaatataaattattccaccataaagatatatgcactctgggaagtgaggagtgcctctgcctggccgccgccccatctgggaagtgaggagcgcctctgcctggccgctgccccatctgggaagtgaggagcacctctgcctggctgcccactgtctgggatgtgaggagcccgtctgcctggctgccccatctgggaagtgaggagagcctcagcccagccgccaactgactggtatgtgaggagcacctctgcctggcttctgccctgtctgggaagtgaggagcaccttggcctggccaccaccctgactgggaagtgaggagcacctctgcccagctgcccactgtctgggaagtgaggagtgcctctgcccggctgctgccccatctgggaagtgaggagaacctctgcctggctgctgccttgtttaggaagtgaggagcacctcggcctggacgcctccctgactgggatggcaggagcatctctgcctggccgccactgtgactgggaagtgaggaacgcctctgcccagctgcccacagcctgggaagtgaggagcacctctgcccagcagcccaccatctgggaggtgaggagcgcctctgcccagctgcctacagcctgggaagtgaggagcacctctgcccagcagcccaccatctgggaggtgaggagcgcctctgcccagctgccgccccatctgggaagtgaagagctcctctgcctggctgctgccctgtctgggaagtgaggagcgcctctgcccggctgcccaccatccccccgatctgggaagtgaggagtgcctctgcccagctgcccaccatctgggaactgagaagtgcctctgcccagctgcagccccaacgtctggcaagtgaggagcacctctgcctggccgccgccctgtctgggaagtgaggacggcctctgcacagctgccacctcatctgggaagtgaggagcgcctctacccacccccgccctgtctgggaagggaggactgtctgggaaatgaggactgcctctgcccagctgcctccccatctgggatgtgaggagcacctctgcctggcgactgtgcaaccttccgagtgtgaagtgacaaccttctgtgtgatcttttctgtcttccccaagtttgcatttttgacattaaagtttactttttaattaaaagttttaaattgggaaacattaaaaaaaagacgtgcacatgcatgttcatttcacccctgtccacaataacaaagacatggaataaacctaattgcctgttaatagtagactagattgaaaaaatatgatgtggtagcacgaggtggctcacatttgtaattccagcactttaggagatcaaggcaggtggactgccttagctcaagagttcaagaccagcctgggccgagtgtggtggctcacgcctgtaatcccagcactttgggaggccaagacgggtggatcacgaggtcaggggatcgagaccatcctggccaacatggtaaaacctcatctctactaataatacaaaaattagctgagcatggtgcacatacctgttaccccacctactcgggaggctgaggcaggagaattgattgaagcagagagtcagaggttgcagtgagccaagatcgtgccactgcactgcagcctggtgacagagcaagactctgtctcaaaaaataaaataaaataaaataaaataaaataccagcctgggcaacatggcaaaactgtatctctacaaataatacaaaaaagaaaaattaggcatgatgttgtgtgcctatagtcccagttacttaacgggctgaggtaggattccttgagccttgagacttggatgttaaggctgaagtgagccaagattgcaccactgcactccagcctgtgtgacagagtgagacgctcttccaaaaataaaataaagatttagtaaaaacaaaatatggtacacaaaaatcgtggaagactacgtgaccatataaaaacaacacaaagccaggcaccatggctcatgcctctaatcccagcactttgggaggctgaggtgggtggataacttgagatcagaagttcaaggccaggctggtcaacacgctaaaaccctgtctctactaaaaatacaaaaagttagctgggcatcacggcaggcacctgtaatcccacctactcaggagactgaggcaggagaatcgcttgaacttgggaggtggaggttgcagtgagccaagatcatgccaatgcactccagcctgagtgacagagtaagaattcatcttaaaaaaacaagcaaacaaacaaaacacaccaagattaagtccttcgcagcaacatagatggagctagagaccattattgttagaaaactgatgcaaaaacagaaaaccaaatgcatgtgattatttataagtaagagctaaataataacacagggacacaaggaaggaacagtcactgaggcctggttggggatgaaggataaaaggacaaagaggatcagaaaaaaatacctctttggtgctatgtttagtacctcagtgacaaaataatctacaccaaacccccatgacacaattttacccatataacaaacctgcacgtgtatgcctgaaccaaaaagaaaagttaagaaaagaaaaacccacgagtgcagaagagcgcagtgtaactggaaagaattgtttgttctacagatagtggtcctggtggggctgtactctgatttatttctgtgtccatgcaggcagatgagattatgaacaggtgctccataatgctaggtagatggagaaaacaggatgctgtggcagattcagtgtctggggtggggatatgccaggagacttgtagacacttttgtggctttttggcaagaaacactaggatcaaaaatgctgtggtgaagttcctgatggtggtgcctagtcccaggaggactgtgaacacattaatgtccagtaggtttgtttgtgagtgggtgggaatgctggggtgacagctgtgagacaagggggtctgtcattagaggtcctttcctctgagttttcattttctctcaccctgggaggagacctggaatcacagaacaacaggtagtgtgacagcctgtgtacaggagagcagagcctcccatttccagacacccagagttccatttgaggtcaggcctctgtgatatctttcttctggcaccaaatctgtagagtttgctgaacaagcaattctctaacaccaactcaatgtctaacatttgaattctgacaccacccagagtcagcacagactctgattcagggctcagttccacaacattgtcctcattgcagatgccagtcacaaaccccataggcccatctatgtgtctgagatactgtttaaaaattggggactcccgagccctttctcaagttcaattatctgatcaacctactcacagaactcagaaaaacactgtagttatgtttaccagtttattataaaacatacaactgaagaaaagtccaatggaagacatgtataggacaaaaaaagaggtggaaagctgaaacacatacataaccctggtaaatagggtaaatagctgtgattaataaaattcttcatcctttgtgttctccaggaatagtttatagaaagaaacactcttcctattatgacttaagatggtgctcttttttcttatttattacagagccagacacagactctgccagaggtacacagcctccattttgaataggggctgagtaaaataaggctgagacctaccgggctgcatttccagatggttaggcattctaagccacaagatgagataggaggtcagcacaagatacaggtcaaaaagctggcttgcagtaaagaagcgggataaaagccaccaaaaccaagatggtgatgagagtgacctctggtcatcctcactgctacactcccaccagtcccatgatagtttacaaatgccatgaaaacatcaggaagttacaccataaagatctaaaaaggagaggcataatccaccttttatttaacatataattaaaaattaaccataaaaatgtgcaaccagcctaaggagaaagccatttcttttatttctttacttccttaataaatttgctttcaccttactctacgactcgccctgaattctctcttgagcaagatccaagaagaaactggaaatttagtatcttattgcaagctagattgaggctggagaaatgggggatgggtcccaagaccctgcctgggacacaggtgaaaaaggcagcagaaaatcagttccccgtggagtgtgaaaataattaagtggcaggaaattagagtgaggtgtttctagtccctgggttcctacttcaaaaaaacaaacacaaaaatctaactcaggtgcattatttttaattaccacattcaaagaaacaaaattcaggcttcagcaactatcaactgccaattaagttctgattacttaatcaggactttttcacctttaatgtacaaattaagacactatgtaaaaaaaaaacacatcacgtggctgggtgcggtggctcacgcctgtaatcccagcactttgggaggctgaggcgggtggatcatgaggtcaagagatcatgacgatcctggccaacatggtgaaaccccatttctactaaaaagtgcaaaaattagctgggcgtggtggcttgcacctgtagtcccagctacttggggggctgaggccggagaatctcttgatcctgggaggcggcggttgcagtgagctgaaatcgcaccactgcatgctagcctgggcgacggagcaagactccatcaaaaaaaaaaaaaaaaaaaaaaaaaaaaagaacacaaaacaaaaaaggctgggcacagtgtaactgtaccatgtaactgtacctaaccaattattaaacttggttttcttcatcatgcattttataaaagactttccttcaagtctctcccatagaccacaaactacaaaccatagctgggtgctctacaattctagaaccactctttgattaagttatttaatatttttgcagtaactcccataaatttttaataggagaaaataggaactgggacccccacgcacgaaagttcttcctatttatgaaccgcatcccaagtcaggattctcccctgatgaccctcccgtggtccctgcacaatctgagagagatgcagggccgcgggtgcagagctgcccagagagggcaccaggccagggcacagtcactgcacagggaaaagacaggacacccagggcgctggctgtcggcacagccaccatattatggctgaaggggactgaggctgagatgggccaggagaacttgggtgcagattgtggagctgactgctgggaggcctaagtcctaccacgaccacttcccactggttccaaccagccccttccgctctctcaggatgtcggacccagcactctcaccatttctaggcttccagggcgtcccgttttagctgtggatctcccaatacctgcaggtcacagggctacagaggctaggcctctaggagcagaagacacagagcagtgaaaatgagacctggagctccagctgcagcaagagacaaaggactccccacatcccagaagccatcctctccactccagctgcgcctgattggacagttcccagcccagcgttgctgattggataatgtttaaaaccccaccctctcaggccttgactgacagaagatgtgattagatgctgggttgaatgaagaaagagtgacagcctaggctgcagccttttcaggcagggcttactgtcagagatgagctaggcccaccttacagggtatttgcattcaaccttgtgtataaggtcatatgcttttgtaaataatgtgtcataaatcctctgaaataaaattttgaattttctagtagccaaactttaaaaagaaacaaggggctgggcatggtggctcctgcctgtaatcccaacgttagggtgaagcaggcaaatcatgaggtcaagagattgagaccatcctggccaacatggtgaaaccccgtctctactaaaaagaatacaaaaattagctgggtgtggtggtgcacccctgtagtcccagatacttgggaggctgaggcaggagaatcacttgaacttgggtggcagaggttgcagtgagccaagctcgcaccactgcatgccagcctaggcaacaagagcaaaacctcatctcaaaaaaaaaaaacaaaaaagacaattgaataaaatttttgtataaatatttacatagcccatcaggtatcagaaatgtacataaagttttgattgtcttctcaggattatatatttgaccaaaaaaaaaaggtcctaacccattttagtaatctataatagtaaccaaacacacagacacaaacacccacacacacacttcatttattaacttagattattttttctctcttctgtgatgagtaattaaatgcagtgtttttgataaaagaagtttttttttttttcctttctgatcttggttatttctttacttctgctgggtttgggtttggtttgtttttgtttctcaagttccttgagatgtgaccttagattgtctatttgtgctctttcagattttttgatgtaggcatttaaggctatgtactttccacttagcttcacctttgccatatcccagatgttttgataggttgtgtcactattattgttcagttcaaataatttttaaatttccatcttgattttattgttgacccaatgatcactcaggagcatgttattcaattttcatgtatttacattgttttgaaggttccttttggagttgattttcgattttatccccctgtagtttgagagactacttgatataattttgattttcttaaatttattaagagttgttttgtgtcctatcatatggtctatcttagagaaagtttcacatgctgatttgggaacttcagtgttaggtgcttatatatttagaactgtaatatttttctgtttgacagggtttttatcattatataatatcccactttgtcttttcttaactgctgttgttttaaagtgtgtttgtctgatatatgaatatctacttctgctcatttttggtatccatttgcatggattttttttttcacatttttaccttaaccctagtgtgttagatgagtttcttgaaggcagaagatacttggttggtgaattcttatctattctgcaattctatatctttcaagtggaacatttaggccatttacattcaatgttactattgagatgtgaggtactgttttatttatcatgctatttgttgcttgaatactttgtttttataaaacattttgttgtattcatattttataggccctgtgagatttatgctttaaagaggtcctgttttgatatttttccaggacttcttagagttccttttagcagtttttgtagtgctggcttggtagcggtgaattctctcagcatttgtttgtatggaaagacattttttccttcaattatgaagcttagttttcctggatacaaagttcttcactgatagttggtttgcttaaggaggctgaaaatagggtcccaatcccttcttgcttgtagggtttttgctgttaatctgataggtttttattttgtatatttttaggttacctggtgcttttgcctcacagctcttaacattctttcctttgccttgactttagataacctgataacaatttgtctaggcagtggtcattttgtaatgaatgtcccaggtgtttttgagcttcttgtatttgaatgtctaggtctctagccaagaaagaaaagtttacctcaattactttcccaaatatgctttctgaacttttagatttctcttcttcctgaggaatgcaaattatttttaggtttggtaatttaacataattccaaacttcttggaggctttgctgatttttttattctttctgtttgcctttgttcgattgggttaattcaaaaatcttgttttggagctcggaatttctttcttctagttgttcaactctattactgagactcttcagtacattttgcatttctctaagtgtgtttttatttcctgaagttgttattgttttttatttattctatttttttcactgaagatttctcccctcatatcttgtattattcattgatttccataaattggactttacatttctatggtacctacttgattagtttaataattgactttctaaatttttttttagacactacatggatttcttcttggtttggattcattgctggtaaacttgcatgatttttgggtggtgctaaagaacattgttttttcatattaccagaattgtttttctggttctttctcatttgggtagactgtgtgagaggggagatctgggggcttaaggctgctgtatagattcttttgtcccacagggtgctccctcgatgtaataccctaaccctttttctagggatgtagcttcctaagagctgaactatagtgattgttatttctcttctggacgcaggtctattagtctctgggctggtacttgagggtgtctgcacagagtcctgtgatgtgaatcatcttcaggtctctcagccatggacaccagcacctgctgtggtggaagttgcagaggagtgaaattgactctgttgcatccttaattgtaattgtttaatgaactagttttttgctggttggcctcctgccaagaggtggcaccttcaagagagcatcagctgtggtagtatagggaggatcagctactggacaggaccctagaactttcaagagaatatgaattttgtctttgtctaccagagtgggtagggaaggaccatcaggtgggggcagggttaggcaagtctgagctgagactctcctttggaggtgcttgcagtggctgctgtggtgggatgaggtgtggttcccaggtcaatggagttatgttcccaggaggattatggctgcctctgctggtgatgcacgttgtcaggaaagtgggaaaaagcagacagtcacaggcctcacccaactcccacacaacccaaaaggccagtctagctcccatgatgcctctccccccgacagcaccaggttagttttcagggagtgggtgagcagggctgagaacttgccccaggctaccagcctcctggcaaagagagcaagcaggacttttacacctttccacctgtcaagtctgcacattggattcacgccctcctctgagttctggcaagaaaacttcacgtttggttggaattgttacaaagttaagctggaggtaaaaccattttatatttttaataaaatatttttttcaaactttctgctaacttacagatctaaatatatttagcttttctatatcatataaaaataagattctagtcaggcatggtggctcacacttgtaatcccagcattttgggaggccaagaaacaaagactgtttaaacccagaaatttgataccaacatggcaaaatcccatgtctacccaatatacaaaaattaacatttgggcacggtggctcaagtgtgtaatcccagcactttgagaggctaagacaggcagatcacaaagtcaggagattgagaccatcttagctaacatggtgaaaccccgtttctactaaaaatacaaaaagtttgctgggcgtggtggtgggcacctgtagtcacagctactcaggaggctgaggcagaagaatcgcttgaacccaggaggcagagcttgcagtgagtcgagatcatgccactgcactccagcctgggcgacagggactccgtctcaaaaaaaaaaaaaaaagaaagaaaagaaaacaaaaattagctgggcatggtggccagtgcctgcattacctgctattcaggaagctgaggtaggaggatggcctgagcccaggagcttgaggctgcagtaagccatgatcaatctactgctctccatcctgggtgaaagagtgaaatcctttctaaaaaaatgccaaagcatagcaacgtaaacttctgtgggtttttttaaattgttgttattattattctaagagcttttgaggtaaaggtgttgtttggctacataggtaagttcttcagcagtaatgcctgagatttaggtgcacccagcaactaagaagtgtatactgtacccaatgtgtagtcttttagctctcaccctcctcctgctcttcccctcaagtcctcagagttcattatataattctcatgctttggaatccccatagcttagctcccacttgtaaatgagaacatacgatattgattttttattcctgagttacttcacttagaacaatgatcttctaatccattcaagttgctgtgaatgccattactccattttttaatggctgagtattacatggtatatacatatcacattttcttcatccacttgatggttgatgggcatttagggtgcttccatatttctgcaattggaaattgttttgctataaacatgactgtgcaagtgtcttttttatataatgacttttttcttcatgtaaatgcccagtagtgggattgctggatcagatggtagttctacttttagttctttaaaaaaatctcctggctgggtgtgctggctcaagcctatattcccaacactttgggaggccaaggtgggtaaatcacctgaaatcaggaatttgagaccagcctggccaacatggtgaaaacctatctctactaaaagtacaaacaaattagccagtcatggtggcatgtgcctgtagtccaagctactgaggaggctgaggcaggagaatcacttgaacttggaaggcagaggctgcagtgagctgacatcacgccactgcactcagcctgggtgacagagtgagactccatctcaaaaaataataataataataaaaattcccagctgttttccatagtgattgtactagtttacatttccaccagtagtgttaaaatgctccattttcatcaaatccatggcaatatctagttttttgatgttttaattgtggccattcttgcaggagtaaggtggtatcacattgtaattttaatctgcattttcctgacaattagtgatgttgagcattttttttcagtattcacattttttatttcaaggtgtaaaatatatgtgtccagtattgttactttcatctgcagatggaataattgggaagtataaaaacctgtacttgacttttttttgtttttgtttttgagacagagtctcgctctgtcatccaggatggagtgcagtggcacgatctcggttcactgtaaaccccgcctcccgggttcaagtgattcttctgcctcagcctcttgagtagctgggaatacaggcatgtgccaccatgcctggctaatttttgtatttttagtagagatggggtgtcaacatactggccacgctggtcttgaactcctgacctcatgatccacctgcctcagcctcccaaaatgctgggattacaggcatgagccactgtgcccagccttgtacttgatattttatcaagattatctgccaacaagttacccatattcgggtttcaatgagcctggaatcttctttccacttgataggggtatgtattaggaaatccagttgatgacatttttatttaaaaaatcaaaaagaatcagcacagtcaggttgtcttagtcttaaggatttctggattcctttcttggaggaggtcaggatctttccaaggcttgggtccttggatattcttccagtcatcaaaagtggagtcttttctcatattctgactctaatgatactatttgctttcagtttttttccaactcaggatcaattttaatcttcactgcatcatgtcagatttgtaaaaactcacgaacaccaaaagaaactccaacaattagcaacaacatggggacttcgtagtggagagtcttattcttgcgcaaagcacgcatcactgcgggtgcaaacgactgaactcttccacccgtttagaactgcaagcaggcccaacgcagattctcaaatctcagtggtccaagctctcatcaagatgagactcaccaactttccttggttgtttggtgttcggtccttactgataggtttccaagcattttttaaatatgtttgttggccatttgtatatcttcttttgagaattgtctattcgtgtcattcgtccacattttcatgggattatttgtttgtttgtttgtttgttttttcttgctgatttgttcaagttccttgtagattccgggtaacagtcctttgttgaatgcattggttgtaaatattttctactctgtgggttttctctttactctgctgattacttcttttgctgtgcagaagcttttcagtttagtaagtcccatttatttatgatttttttttttttgcatttgctttagggttcctggttacaaactctttgcctaagcaaatgtctagaagcgttcttctgatgttatcttctagaatttttatagtttcaggtcttagatttcagtctttgatccatgttgagttgatttttgtataggatgagagatgaagacccaattttcttattctacatgtggcttaccagctatctcagcaccatttctttaacaggctgtcctttttttttttttaaaacggagttttgctcttgttgcccaggctggagtacaatggcacaatcttggctcactgtaacctctgcctcctgggttcaagtgatgctcctgcttcagcctcctgagtagctgggaatacaggcgcgtgccaccatgcctggctaattttttgtattattagtagaaactgggttttgccatgttggtcaggctggtcttgaactcctaacctcaagtgatccacctgtcttggtctcccaaagggctgggattacaggcataagccactgtgcctggctaatttttgtagttttattaaagatgaggtttcaccatgttggccaggctggtctcaaactcctgacctcaggtgatccacctgccttggcctcccgaagtgctgggattacaggcatgagccaccacgcccagccttagggtgtcctttttatactttgttttcgttaacagtgtcaaaaattagttggctttaagtatttgggttcatttctgggtatgaaattctgttgttgttctacatgcctatttttataccagtaccatactgttttgataactatcaccttttgatatagtttgaagttggtaatgtaatgccttcagatttgttcttattacttagtcttgttttggctatgtgggctttttttggttcaatatgaattttataattgtctttttttgttttagttctgtgaagaatgatgatgctatctttatgggaattgcatggaatttgtagattgtttttggcatcatggtcatgttcacaatagtcactctacttatccatgagcatgaaatgtgtttccatttgtttgtgtcatctataatttatttcaagtgttttgttatttaccttgtagagatcgtttgcctccttggctaagtatattcctaattattattattattattattattattattattattattattatttttcagctgttgtaagaggggttgagttcttgatttgattcctagtttgggttgctatttgtgcatagcagtgctactgaattttgtacattgattttgtatcctgaaacttcactgaattcatttatcagatctaggggctttttggatgagtctttagtgtcttttaggtatacaatcacatcatcagtgaacagtcacagtttgacttcctcttttccaatttggatgccctttatttctttctcttgtttgaatgctctggctaagaattccagtactatgtcgaatagaagtggtgaaagtgaacatccttgtcttgttctagctctcaggggtaatgctttcaaatttttcccattcagtataaggtgggctgtgggtttgtcataaatggcttttgttaccttaagctatgtcctctctctgccagttttgctaagggttttaatgctgaagtgatgctggattttgtcagatttttttctgagcctattgagataatcatgtgatttttgtttttaattctgtttatgtggtatatcacatttatttacttgcatatgttaaaccatcccttcatttctggtataaaatgcacttgatcatggtgtattatctttttgatatgctgttgtatttggttagctaggaatttgctgataattttatcatctatgttcatcagaaatatttactttttttgtttttttgtcatgcctttttctggtttggggattagggtgatattggcttgatggaatgatttagagaagattacctttttatcttttggaatagtttcagtaagattggtaacaattcttctttgaatgtctgatgataaaatatatctgtgaattcatgtactcctggacttatttggttagcaattttttattactatttcaatctcactacctcttattggtctgttcagagtttctgtttcttccaggtttaatctaaaaggattgtgtatttccaggaatttatgcatcttctctaggttttctaatttgtacatgtaaatatattcatggtagcaaaatcttttgtatttctgtggtattgtctgtaaatcttccattttgtttgtaattgagcttatttagatcttctctctgctttttttggttaatcttgctagtaatggtctatcaattttgttcaactttgtaaacaaccagctttttgtttcatttattttcttgtatttttttgtttcaatttcagttagtttttctctttgttattttttctgtgctgctgcatttggatttgatttgtttttgcttctctagatttttgaggtgtaaccttatgtagtctgtttttgccattttagactttttgatgtaggcatttattgctatcaactttctcttagcacgacttttgctgtatcccagaggtattcataagttgtgacattattgtcattcaaatcaaagtgtttttaaatttccaccttaattttgttgttgattcaaagctcattcaggaggctgggcatggtgactcactcctataattccagcactttggtgggcagatcacttgaggtcaggagtttgagactatccttgccaaaatagtgaaaccccatctctactaaaaatacaaaaattagccaggcatggtggcttgttcctgtaatcctacctactcggaggctgaattgcttgaacctaagaggtggatgttgcagtgagccaagatcatgccactgcactccagcctgggcaatagagtgagactctgtttcaaaaaaaaaaaaaaaaaatcattcaggagtaggctatttgggtttatttctgggttctgtattctgttctactgatctatgtgcctggtttttttgtttgtttgtttgtttgtttgtttttttgagatggagtctcgctctgtctcccaggctggagtgcagtggcgcgatctcggctcactgcaagctccacctcccgggttcgcgccattgtcctgcctcagcctcctgagtagctgggactacaggcgcctgccaccgcgcccggctaattttttgtatttttagtagagacggggtttcaccgttttagccaggatggtctcaatctcatgacctcgtgatccatctgcctcggcctcccaaagtgctgggattacaggcgtgagccaccgcgcctggcctatgtgcctgtttttataccagtatcctgctgttttggggactagggccttataaaatatattatgccttgaagtcaggtaacacgatgcctccagatttgttctttttgcttagttttgctttggctatgtgagctcttttttggttccatatggattttatcagtgatttttctacttctgtgaagaacattggtggtattttgatggaaattgcattgaatttttagattgctactgatttgtgtacgttgattttgtatcctgaaactttgctgaattcatttatcagttatagaagcttttcagaggagtctttaatgttttctaggtatactattatattaccatcaaacagcaacagcttgatttccaccttaccaatttaaaactttttttttttttttttgagacggagtctccctctgtcaccaggatggagtgcagtggcacgatcttggctcactgcaacatctgcctccggggtcaagcgattctcctgcctcagcctcctaagtaactgggactacaagtgtgtgccaccacagccggctaatttttgtgtttttagtagagacagggtttcactatcttagccaggctggtctcgaactcctgggctcataatccacccgcctcggcttcccaaactgctgggattataggcatgagccaccgtgcccggcctaacaattatatctgtctcatcacttaaaagagccactaattttttttttttgagatggagtcttgctctgttgcccaggctggagtgcaatggcatgatctcagctcactgcaacctccgcctcctgggttcaagccattctcccatctcagcctcttgagtagctgggattacaggcacgcaccaccatgcctggctaatttttgtatttttagtagagatggggtttcaccatgttggccaggctggtcctgaactcctgacctcgtgattcgcccgccttggcctcccaaagtgttgggattacaggtgtgagccactgcacccagaaagagccgctaattttactttggaaatatagtgaatatttatattaaaagctaggctaagcttactattatgtagaaaatttgtgatttgcatgtgcattattacccattaagtggtctacagtttctgaaagtttcagaaacaccaatataaaaatactatttctgattgaataaaggatatcaagttattttagttactaaatgaaacagattggaattactggtcacaatgtggttttaaatgttatttaatgaaaacgtgaagtttctgttcaactcatgttaactatttctattgtttttttcacttctattagaaaaatattaaaatttaaattgctacaaatgtatgaatgtattcaaatctaaacacagtgccaatcttaaaagatctgtatgcataggattatagaacacctattctctttttacacttagaagataaataactgcttttcagtaaacccaatggggcaattgtgactcacaatcataagctactaaaatattaatactatcatctagaaagtattaattcatttttcttacttatgaaacacaatcataatttctagttgacataacactagatttgaggtgctgtggctgtagtaactagaaatgtcatggttgactcagctttaccttctgcctatttctcacaaacacagcaaaacaaggaaggccagaaatcctacaccttgattgcaaacacaccagtacccttctagggagaatatatgtttgaacatattaacttgaaattcctggcatcttttcttgaagaacagactttttttttttttttttttttgaggtggagtttttctcttgttgcccaggctggagggtaatgtcgctgtgtcggctgaccgcaacctctgcctcctaggtacaagcgattctcctgcctcagccttctgagtggctgggattacaagcacctgccaccatgtctggctaattttctttgtatttttagtagagacagggtttcatcatgttggccaggctggtctcgaattcctgacctcaggtgatccgcctgccttgaccttccaaagtgctgaaattacaggcatgagccacgatgcccagcctgaggaacagatttctatatggcaaataataaaggcaaataaaaattaacgctaaaatagaatgaggaaagtattctttcttcaccagaatggttgtgacagaatggttgcagcagggtggtcttaaataaccctcactctattttgttattcttgagttatggtcataagacatttatgcttatttgagagaaatctttttttcctaattcagaaatttagcatgattttcacaatctcacattttcaaaaatggttcattataaaaaagaaagatgattaaaccaacttccattttttccccaaagagtaacaaattaaatctgtagtctaaagtacagctaataaaaaataaagattagtcacttattctagctgcataattgggaataaaacacttcttgagctatagaccaagagctttcagagatgttagcttatagaatgtcgagcgacctggtacagagactttcacccctctttcaaaagggaacataatactgagtctttcaccccaattccaactattaagccagaacgggagaagtgtaacatgtcattatccacaaaccattttattattacagattgagggtatgtgtgcagatttgtaacacaggtatactgcatggtgttgaggtttgggcacttaataatcccattacctaagtggcatacatcatacctgttaagtagtttttcactgtttctctcccttctttcttctttttggaatccccagtgtttattgttttcatctttgtttccatatgcacccaatgtttagctcccacatgtaagtaagaacatgtaatagttttctgttaatttgcttagaataatggccatcttctgcagacatgttgctacaaaggacattacttcactgtcttctgtggctgcatagtattgcatgatgtacaagtatctaagttttttttatccaatttaagattcatggctacctagtttaattctgtctttgctactgtgaatagtgctgcaataaacacgtgagtgcaaggagtcttttgggtaaaataatttattctcaggcggggcacagtggctcacgcctgtaatcccagcactttgggaagcccaagtgggtggatcatgaggtcaagagttggagaccagcctggccaccaggatgaaaccccgtctctactaaaaatacaaaaaattagccgggcatggtgacacatgcctgtagtcccagctactcaagaggctgagggaggagaattgctggaacccagcaggcagagactgaagtgagtccagatcgcgccactgcactctagctggggagacagagcaagactccatctcaaaaataaacaaataaataaataaataatttattctccttttggtatacacccagtaatgagactgatgggtcaaacggcaattctattttcagttaagaaatctccaaactgcatttcacaagggctgcattaaactgcatttcaaccaacagtatatatacattcccttttctccacaacttcaacatctgcaatatttttactttttaataacagccattctaactgctatgaaatggcatcacattgtcattttgatttacatgtctctgatgattagggatggtgagcaattttttgcatgtttattggcaactctcatgtctttttttgagaagtgtctactcagatcatttgtgtatttccttattaaatttttatagtattctaaccattaacttaatttatatattatataaatacataatatatatgaataaatattaactttttcttgtatgaagtttgaaaatagtttattccatactctaggttgtctgcatatttgtcaatggtttcttttggtgtgcagaagttttttagtttaattaggtgttaatttttcacttttatttttgttgcattcacttttatggtgttagtcataaatcctttccagaggccagtgactagaagagtacttttttgatgttctacgatttttatagctttaagtttcacagttaagtttttaatctattttgaattacattttttatatggtgagaggtacagtttcaattttctccttctacatatgattaaccagttttcccagtaccatttgttggatagacaatttttccttgtttacttctgttgactttgtcagaaaaaagttgggtgtagaaatgtaaacttatttcagggctttctcttctttctattggtctacatgtgtatttttgtagcaagccatgtaatatggattactgtagctttgtagtacaagccaggtaatgtgaggcctccaggattgctttgttgttaatgttgctttggctaaatgggctgttttattcttccatatgacttttagaatggttttctttttctaattccataaaaagttgcatttatagtttgagagaagtagcacttaatctgtaagttgctttaggcagcacggacattttaattatattgattctttaaattcatgagcatggagtgcctttttacttatttgcgttgtctctattttttttcagcagttttgtagttcttgttgtagagatattttacctccttgatttaatgtattactaggtacatatttttttgtttgtagctattgtaaatagaaccatgttctttttttctcagcttgaatattattggtgcacagaaatgctactcatttgtgtatgttgatttagtatggtgagactttgctgaagtcattctttaggcttagaaatcttttggtgaaatctttttcggtgaagtttcccaggtagagaattatatcaccagtgaagataatttgacttcctctttttctatttgaatacattttattgctttatcttgttaaattgctgtggctacgactttcaggactatgttgaatagaagtgtttagagtggatactctttgtctttttttttttttttttttgagatggagtctcactcttgttgcccaggctggattgcaatggcatgatctcagttcactgcaacctctgcctcccacattcaagtgattctcctgcctcagcctcctgagtagctgggattacacatgcctgccagcacgacaggctaattttttgtatttttagtacagacagagtttcaccctgttggccaggctggtcttgaactcctgacctcaggtgatccacccacctcagcctcccaaagagccgggattacaggcgtgagcaactgcacccagccttatttttattctgatggagacctcatccaggttttgcccgctcagtatgatgttggctgaggatttgtcatggatggctcttattattttcaggcatatttctccagtgcttagtttgttgagaatgtttttataaatgagtattagattttcttgaatgccttttctgcatgtgataattgttttttaaaaattatctttacatggtgaatcacatttatttacttgtatatgatgaaacatctttgcattcatacaatgaagtttacatgattgtggcaaaataactttttgctttgcttatgaactcaacttgctagtacttcatgaatttttgtttcaattttcaccaagaatagtgaccggtaattttccttttttgttgtgtcttcactaggttttactaccaagataataatgttttcaaataatttaggaaggacttccaccttgatttttggaatacactcagtagaattaataccaggttatctttgtatatgtgataaaatgtggctgtgaactcatcttatccagggctttctatggttggtagcttgttttattagtaattcaatcttattatatactttatacattgttgctctgttcaagacttctgtttctttctggttcaatgctgagaagctggatgtatccaggagtttatctattttctctaaattttttagtttgcatgcatagagatgtgcatagtagtctctgaggatgtttactatttatgtgaaattagttgtgatatcacaactctaacatttaaatagatgcagaataaaagcttgacaaaatttggctgggtgcagtggctcacacctgtaatcccagcactttgggaggtcgaggcgggtgggtcacctgaggtcaggagttcgagaccagcctggccaacgtggggaaaccctgtctctactaaaaatacaaaaattaactgggcgtggtggctcacgcttgtaatcccagctactcaggaggctgaggcaggagaattgcttgaacctgggaggcagaggttgcagtgagccgagatcgtgccagtgcactccagcctggatgacaagagtgaaactccagccaaaaaaaaaaacaaaagtttgacaaaattcaacattccctcatgataatctctaaaaaataattagtataggacaaatgcatctcaagccaataaatgccatgtatagaaaaaaatgtccagctaacaacatattaaacagtgaaatgtaagctcttactctaagacctagaacaagacagggatgccctctttcttccttttcctttcttcctttccttctctccttttcttgcttctctttctttctctctcctttcttcctttccttctctccttttctttcttctttctttctctctctccttccttccttttctttctttcttgttctttcttcttttttttttttgacggagtctcactcttgtcacccagactggagtgcaatggcacaatcacagctcactgcaacctctgtctcccaggttcaagcgattcacctccctctgcctcccaagtaactgggattacatgcacctgccaccatatccagttaatttttgtatttttagttagactgggtttcaccatgttggccaagctggtctcgaactcctgacctcaggtgatccacctgccttggcttcccaaagtgctgggattacaggcatgagccaccactcctgagcagatgaccactttcttcattcttaactaaacataatactaaatgtccaaagagagaaattgtaagataaaagcaaagataggcagattggaagaaaagaaattaaattatttgtttgcagacgatataatcttaagtacagaaaagcctaagactttactagaactactagaactaataaacaaatttattaaatttgcagaatacaaatcaacatatgaaagtcagtagcatttctatacactaacaattaactatctcaaaatgaaatttaaaaagaatcccagctacaataacttgagtaactatactttgaaataaatttaagtaaaaaggtgaaacaccttatattataatctaaagaacataaaagtaaaaaattaagtaatacacaaatggaaaatattactcattcctgaattggtactattaatattgctaaatatgtgtgttaaacaaaataatctacagataaaatgtaacctgtatcaaaataccagtgacttcataaaatttttaaaatgtatttaaaattaatatggcaccacaaaagaccccaaatacccagagcaatcaagcaaaaaagaaaggttgaaggtatcacacaaccttactttgaaatatactacaaagctatagtgaccaaagcagtatattggaataaaaatgaacccaaagaaaccagaaatatatccatgtatttacaactgtctaattttaaatataggtgacaatttctcagagaaaggacagtatcttcaataaatggtgttgagaaactttacagccacatgcaaagcaatgagaccctcatttgacaccacatgtaaaaatcaattcaaaataaattagaaacttacatgtaatgcttgaaactgcaatgaaactaatacacaaaagtagagtaaaagccccataacattggtctaggcagtaactttttttttttttttttgagatagagtctcgttcttttgcacaggctggagtgcattggtgcaacctcagctcactgcaacctccatctcccgggttcaagcaattctcctgcctcagcctcccaagtagctgggactacaggtgtgtgccatcaagtctggctaatttttgtatttttagtagagacggggtttcaccatgctggccaggctgttctcaaactggcctcaagtgatccacctgcctcggcctcccaaaatgctgggattgcaggcatgaatcaccacacccggctggcagtgactttatgatttaaactcaaaccccaggaaagcaaaggaaaaatagatgactcagattacttcaaattaaaaagctgctgcacagaatctgatgaaatcaacaggatgtgacaactaagaaataagagaaaatatgtgcaaatcatacatgtgacaaagggttaatatcaaaaatatattaaaattcaaatgactatatcacaaaaaacaaattaaaaatgagtaaaatgcttatttttcaaaagacatacatagagccaacagatacataaaaaattctcaatgtcaattattattattgaaagccaagacaaaataactgtgagatatatactcacttttgatagaatgactcttagtaaaaagaaatgtgttgataaagatgtgaagaaaagggaatgcttgtatactattggtatgagtgtaaatgaggacagccattttggaaaacaaaagagagatttttcaaaaaaaatttaaaatcaaactaccatataatacagcaattgcactattaaatatacatccaaaatgaataaaatcacaatgaaggaaagtttgcacttctatgttgtttgcaacactcaacacctaataagtaaataaagacaatgtggtagatatatctagtggaatactcttcacctctaaaaaaaaattctattattttcaaccacatggattaacctagaggatattagttgaaataagccaggcacagaaagattagtatttcacgatttcacctacacttaaagtataaataacaaatctcattgaagtagagagtaaaatggtgaccacaagatgccaagatacttagaaaaaagaatggtttggaaagatgtctatcaatgaatacataattatagttaagttggaggaataagttcaagatattgtttgtgcaacactgactacagttcataatattgtatttttgaaaaatggtaagaggatattacaggctctcaccacaaaaatgtaaactatgtgaggtaaagcattaattacctagaatttatcatttgacaatgtagatatacttcaaatcatcatgctttacagaacacacatttcatctgtccagttaagaaatgtatttttaaaacattatagaaggataacaatgtttcaaatattgtgtcttcatcattaattttgctgaatagtatccaaaatatatggtttttgtgctgtttttttcgcattatttttcagccacaacacaaccataggtactctgatatttaacagcatgttctggacacagcacagtgtatgagaggagccaatgtagtttagggcttctaagcttggggcacctggagtttctggtgctgatggtaatggtatgatagacagtaaatgggcaggtgatgtttattgtcccatgactgtgaacacagtaaacaagcttgcatgcaaaataataggaaatgttttaatccacaagttgccaaaatttccaaaattcttcagagaaaatgaccaaggagttggctatacttagatgactcagaataaaaactgtagattgggccaggtgcgggggctcacgcctgttatcagcattttgggaagctgaggcaggtggatcatgaggtcagcagttcgagaccagcctgcccaatatggggaaaccctggtctctactaaaaatacaaaaattagctgggtgtggtggcgcatgcctgtaatcctagctacctggaaggctgaggcaggagaatcacttgaacctgggaggcggaggttgcagtgagccgaggttgggccactgcactccagcctgggcaacagagcaaaactctttctcaaaaacaaaaaaaaactgtagactgaacttcacccactgaaaaaaagttatatgaactggaaatttcttcaaattgtaatatcagtatggaaaagaaatattatctcaaatttcaaattcacagaggtcactttattattttgccatgtttaacattcactcttaaagtagaagattctgcatagaaattaagttacactacattacagaaaagtaaatttaaaattctttacttaccattagaactcctaaaattttgatttctaaaatatattctctagcaaattttgtatttgctacacgttgtataaaaatctaggccaggcgcagtggctcacgcctgtaatcccagcactttggaaggccgagatgggcggatcatgaggtcaggagatcgagcccctcctggctaacacggtgaaaccccgtctctactaaaaatacaaaaaattagctgggcgtgttggcgggcgcctgtagtcccagctactcaggacactgaggaaggagaatggcgtgaatgtgggaggcggagcttgcagtgagccgagatcgtgccactgcactccagcctgggggacacagcgagacactgtctcaaaaaaaaaaaaaaaaattaaacagatttcaacaagaaaaaataataaaaatttaacctacggaaacagtattttttaaacttatttgcagttgaaagccactggcaaaggagattaccagagatgttagttgattacattaccaaatagtatattcttactatcatttacctacacctttgagtaaatgggataggtttcagttagtggcataataatgcttcattgaatgcacaatagtattaacatgttaaaaatgtataatgaaacaagttcacacatcatctgaaaatttaaaaatgtactgcattttattacataaaagtacaaatagtaaaataacgtactaattttttaattttaacaaaacttaaatgttcttactataatgcaaaagaatattactctaaacacctacctcatgcaccactcaatatcataattaaccacaaataccatctccacttagattttcatcatgcatgttacattttaatgtccttactcttccaaagaaaaggtcataaataatgcccacctaaaaaaaaagaaactctcctatctttgatgccgtgacaactgatcacatgctttcacatgtgaatacaatagaaatgaagaaatagcatcaagtaactagagagttgaatcacagcaatattagctttttaaaaaatctgtacttcttttcaaggaaaaaagaacactttgggccgggcgctgtggcttaagcctgtaatcacagcactttgggaagccaagctgggcagagcatgaggtcaggagttcaagactaccctgaccaatatggtgaaaccccgtccctactaaaaatacaaaagtcagccggacgtggtggtgtgcacctgtaatctcagctactcagtaggctgaggcaggagaattgcttgaacccaggaggcagaggttgcagcgagctgagattgtgccactgcactccagcctggacgacagagagagactctgtctcaaggaaaacaaacaaacaaaaaaagtatactttgaatgtaattacaaacttccaaaaaatcttctactccttttaaagttatgtacaaataaatttatctaccgttagtttgggatcatttttaacagtcagcactttgatatagtgtaatgtctgaagcatccataccttagtttgtttgtttttgagatggagtctcactctgtcacccggctggagtgcagtggtgcaatctcggctcactacaacctctgcctcctgggttcaacggattttcctgcctcagcgtcccaagtagctgagactacaggcacgtgccgccacgcccagctaatttttgtatttttagtagagacagggttttaccatgttgaccaggatggtctcaatctgttgacctcatgatctgcccacctcagcctcccaaagtgctggcattacaggcgtgagccaccatgcccggccctaccttagatatttccactgtgaattctctgatatttacatagacttattttggattaaatgttttaaatatatactgcatctgcaaaaatatatctcagtatgaaccctctggtgttgtctaagttgtagttttggaaaacttttttttcaaatttattacatttgcagggtttttctccaatctgaattccctgatgttgaacaaagtttaagtaactgcttcagggttttctctagtacaaaatgtgtacaataagatctgtgatacaaataaaggtattacaatcctcttttatttgtaatgtttgtcttcaaaataaatactttaaaagcttatattttctgaaatactttttgacagtaattaaatttataatactttttttaagtactctctgatgttgagtaagatgtgagcagacattaatggctttttcacagtctttatattggtacaatttttctcaagtataaatgctttcctggcaataaggtgtgagtattcattaaaaattttgccacattcttcacacttgtaagagtttttctagtaagaattatcttacctacaatcaagtgtgacaatcatttaaagattttgtcacatttttcgcatttttaaagttcctcaccagtatgatttattttatgtttagaaaagtttgaggtgttgtcagaattactgtgatgtcttccagctttgtagtttctctccagtttaagtttttttatgtttagtaagatttagggaccagttaaatgctttgccacattctttacatttgtagggtttctctctagtatgaattatcttttgtttcataaggattaagagccagttaaaggctttgccacatttatcacatttgtaggatttctctccagtatgaattatcttgtgttttaataaaagttgaaaatacactaaaggatttgacacattatttacatttgtagggtttctctttggtatgaattctcttatgtttagtaaggtttggggactggttaaaggctttgccacattcttcacatttgtagggtttctctccagtatgaattatcttatgtttcataagggttgaggactggttaaaagctttgccacattctttacatttgtagggtttctctccagtatgaattatcttatgtgtagtaagatgagaggacagaataaagcttttgccacattcttcacacttatagggtttctctccagtatgaatttttttatgattagtaaaatttgaggagtagttaaaagttttgccacattcttcacatttgtagggtttgtcttcagtatgaattactttatgtttagtaaggattgagaatatactaaaggctttaccacattcttcacatttgtagggtttctttccagtatgaattaccttatgataagtaagagttgaggacttggtaaaggctttaccacattcttcacatttgtagggtttctctccagtatgaattaccttatgattagtaaggtgtgaggaccggttaaaagctttgccacattcttcacatttgtagggtttctcttcagtatgaattatcttatgtttagtaagggttgaaaatacactaaaagctttgccacattcttcacatttgtagggtttctcaccagtatgaatcctcttatgtgtagtaaggtgtgaagatagggtaaaggctttgccacattctccacatttgtagggtttctctccagtatgaattttcttgtgattagtaaggtttgaggactgtttaaaagctttgccacattcttcacatttgtagggtttctctccagtatgaactatcttatgtttagtaaggtttgaggaccggttaaaagctttgccacattcttcacatttgtagagtttctctccagtatgaattatcttatgtctagtaagagttgaggactggttaaaagcttttccacattcttcacatttgtagggtttctctccagtatgaattatcttatgattcgtaaggtttgaggactttttaaaagctttgccacattcttcacatttgtagggtttttctccagtatgaattatctcatgttgagttagttgtgaaagcatgcaaaatgatttgccacattctttacatttgaaaggattttttccagtatgtcttatcttatgtctctttgcatttgaatatttatgaaagactttcacgtatttgtcacactgaactattttgctctgggtagttgtcacacaccggttaagtcccttgtgacctcctttgtgcaacttatgctcatccacacttttacagcctttctgatatccacattttccatatcttctcagtatcacttgttggaaagaattttttatatattgctctggcctaaggtctttggcaaaatgagaacacatagctgaaagaaataaaaataacaaattattccatttactcaactcagattaatatttacaaatctaacttataccaactatataaacaagatgacatagcaaaatactacagatcctaaatcctttatagacatataaatgtaacaaaagcattctgaccaaaatacatttgtaaaaaatttataaataagtaaagtctgtgcagtgccccaggtgatgacaatgcaaagagccacataggagaaaaaagaaaagtctgttacatttacccaacacacctctttctgctgcccaatataacatagcgccttcagaagtaaattgccaactcctggtttcttttttaaaagactaaaaaaaatagtgtcacatacatctttatttctggctcttaggggccttttcagacactggtttctgtctcccatgacataaagtgctaaaagaaatggtggtatactttggaatgacagtttgagtctgctgagaccaaagttaagtgttacagcagcagagactgcagtaccacatacaggaaacaggtttagcaagtgattactgactatttagaaaaaacactaacatacttctttaacttaaaaagcccacaaaatttcagacaagacacaatctaagaaaatgtttgcgagactcccaaaatctctagccaagacaactggtttcaaactatcccaggcctaaggtacattataaagattgtgacagggccgggcacagtagctcacagctgtaatcccagcattttgggaggccaaggcgggtgaatcacctgaggttgggagttcaagaccagcctgaccaacatggagaaaccccatctctactaaaaatacaaaattagctgggcatggtggcacatgcctgtaatcccagctactcgggaggctgaggcaggagaatcgcttgaactcgggaggcagaggttgtggtgagctgatatcatgccattgcactccagcctgggcaacaagagcaaaactccatctcaaaaaaaaaagattgtgacaggtagcttgtttttaatgtttaaatctcaatcaaagattaatgtacacaaaatattagggcaggatgaccccatcaaaaacattactaaactttcagaaagcaaccataggaatataaagatgtataaatttttcaatttaaaataaattaaatactacacagtgaatgaaacaggaacacagacaactactgaagttcagaaaaatgaggataacaataaaaatattaaaaatctcaaaaaacataaattaggaagataaaaatgtcagacaagaagagaatcttgggagctgcaagataaagtaatgtatcatttataaaaatgtcttatgagataaccagtaacttttcaaaaaaaactggaaggcctgaagagaactgggtgatatagtcaaagtcctggggaaaaaaaaaaaatctgtcaagtgaaaataatgcaagtaaaaagaagtggccgggcacagtggctcgtgcctgtaatcccagcactttggaaggccgaggcgggcggatcacctgaggtcagaagttcgagaccagtctagctaacatggtgaaaccccgtttctactaaaaatataaaaaattagccgggcgtggtcacgtgcccctgtaatcccagctactcaagaggctgaggcaggagaatcggttggacctgagaggcggagattgcagtgagccaagatcatgccattgcactcaagcttgggcaacaagagcgaaactccttctcaaaataaataaataaataaataaaaaagaactgtccaactgaataaaaagaaagaccttccaaaataacctaatcctgaaaaagtatattggcacttcatatgccctacataccaaagatgctgaaaggagttcatcccactgaaaataacatgatgcaggaaaacacataatcatacaaaaatacataactttctgggaaagatatttacatacacaaaaacagaattccttagcattttaataatcatgcagaaaacattattaatttttctctaaaatttaaaagataaaagcatagaaatgattataaacatctgttaatgtaacataaaaataaataattagtggccaggcacagtggctcatgcctgtaatcccagcactttgggaggctgaggagggcggatcacctgacgtcaggagttcaggaccagcctggccaacatggtgaaaccccatctcaactaaatatataaaaattagctgggcgtggtggtgggcaactgtaatcccagctacttgggaggctgaggcaggagaatcgctttaacctgaaaggtggaggttgcagtgagccatgattgcaccattgtaatccagcctgggtgacagagcaagactgtctctcaaaaaaaatgaataaataaaaatttaaaaaatatatatgtatataattagcaacatcagtaacaaagtagagagcagatataatgagaaagaatttttgtatgcaaataaggtatatatatatatatatatatatatatttttttttttttttttttttttttttttcagatggagtctcactctgtcgcccaggctggcatgatctcagctcactgcaacctacatttcccggattcaagcaactgtggtgcaaataaggttaatttttactacattaaaattgttttattttctaaagtttttatgtaattcccaaggtaccacaaagaaaatatctgtatagatacataaaagaaaataagaaagaagtgaaagcatattaatacaaaaaccaaaggacacaaaagaagacagagggaaaatgagggacaaagatacaagaattaaacaatagaattaataaaattacattagttactctttcagaaaattatttaaatatatataaaattaacttttcaatctagagacataattttcaacgaaatgatttattaaaatctttcaaataccaagattcatttgcctttttgcaagtcagttgaaacctaatgataaaaaaagactgaaagtagcaagatgaaagtagaaattttatgtaaatattaaccaaatgagagaagaagaggtcaaaataatattacacaagctacatcttaagtcaaaaagtgtcatatttaacaacatgtactttaagtgaaaactctgaaaagagaaaaaaggacactgaacaatagtagtttcatttactgggaacaaatgactagtgtgtgtgtgtgtgtgtgtgtgtgtgtgtgtatgtgtacagacgcacatctcacatgagggtttcaaatatataaaacaaatattgacggaattgaagaaacacacagagagcaatataattatagtagaatatattaagaccccattttcttaataaaaataaaacaagatggaatattagcaagggaatagaaaacttgaaatcagtatggaacaattatttctaacagaggtatagagagctgaacatcaggatacacacccttcccaatagttcatacaacattctccttgaaaggaccatctgttaggccaaaaaaaattcttaacaaattttttaaaactgaaattttatgaattactttctgtgaccaaaatggaataagattataaaacaataatttaaaaaacggaaaaattcacaaatatatagaaattgaacaacacacttttgagtgtgctgttgttcaaaggttgaaataattaatattgtgtagatgtccatgctgctgaatgtaatctagagatttaatgtaatgtctttcaaatttcttattgcacttctgaagaaatagaaacagcaaccccaaaagtatatggaatctcaagagactatactcaacaatcttcaaaaaaaggaacaatgttagaggtatcacagttctttacttcaaaatacatgacaaagctacataataaaaacaattttgtgtgaatataaagataagaaagtagactaataaaatagaatccagcacatgaactttcacatatatggtcatataaagagtcatttgcttacccataattattgcagcactgttactgaaagccaataggtaaaagcaatgcaaatttctgttacaaaatcatttagtaaatataatttgaaatataaaaacggaatatcactcagtttgcaaacagcagaaaatattataacaactataaagataaatcttaacattatgcaaaatgaaacgagccagtcacaaaaagacagagattgtatgatatgtctaacagttacactctgaaacagaacaagaatggtgtttgaaaagtgagatgaaatgggaataattggtagttgtttaatgtatattaagatttagctttacggccaggcagtgctgtactcccagcactttagggggccgaggcgggtggatcacgaggtcaggagttcaaggccagcctggccaagatggtgaaaccccgtctctactaaaaatacaaaaattagccaggcatggtggcgggtgcctgtaatcccagctacttgggaggctaaggcagagaattgcttgaacctgggaggcagaggttgcaatgaggcgagattgcaccactgcactccagcctgggtgacagagtgagactctgtctcatacacacacacaaaaaaacagatttagctttgcaagataaaaacattttagcatatgttgcataccaatataaatataattaatatgaataaactaaatatttaaaaatcttttaggtgaggcacagtggctcatgcctgtaatcccagcacttggagaggctgagacagatgggtcacttgaaatcaggagttcaagaccagcctggccaacatggtgaaaccccatctctactaaaacaacaacaacaacaataacaacaacaaaaaattagctaggggtggtgatgcacacctgtaatcccagctactcagaaggctgagtcaaaataattccttgaacccaggaggcggaggttgcagtgagccaagatcacaccactgcactccagcacaggagacacagtgagactccatctcaaaaaaaaaaaaaaaaattgtttttttaattctaaattttgctgtgtttttgacaagtaaaagtaaacaataatacttagataaagttatcatagttttaaaaatatctttaaatccaaaaataatagagattcacaaataaattgaatgttaatattagaagaatttctaacactattcacttagacaggattaaacaactattcacaacacacctacacaacaaatacacaagttataacaaaaatacatggataggctgggtgcagtggctcatgtctgtaatccaagcactttgggaggaaggcggatcacgagatcaggagttcgagaccagcctgaccaacatggagaaaccccatctctactaaaaatacaaaattagccaggcgtcgtgccactgcactccagcctgggcaacagagcaagactccgtctcaaaaaaaaaaaaaaaatgctgggcacggtggctcacgcctgtaatcccagcactttgggaggctgaggcgggcagatcacatgaggtcaggagttggagaccagcctcaacatggagaaaccccatctctactaaaaatacaaaattagtcaggcatggtggtacatgcctgtaatcccagctactcgggaggctgaggcaagagaattgcttgaacctgggaggcggaggttgcggtgagctgagatcgcaccattgcactccagcctggacaacaagaacgaaactctgtctaaaaaaaaaaaaaaacaaaacagggataatatttacacaagcaaacagagataattatattggcagtagacatatggctgattcatatttaattttgcttgacattgtcttaaattgcattgagttaatcattgtcatatacaatttattattattatttattattattttttgagacagagtctcgctctgtctcccaggctggagtgcagtggcaccatctcggctcactgcatgctccacctcccaggttcatgctattctcctgcctcagcctcccaaatagctgagactacaggcacccaccaccaggcccaggtaattttttgtatttttagtagaaacaaggtttcactgtgttagccaggatggtctctaactcctgacctcacgatccacctgcctcggcctcccagaatgcttggattacaggcatgagccaccatgcccggcctgtcatacacaattataatacaaactcaaatatcaaaacacaatttattggtgtgaggtggcataacctaaaaaatataactcaaaaatataaaattgcaaaacaaaattaaaatatgaaatgtaaaacttattggacactatcaagtagattaatatattcatgaaagaaatcctagaaaaagaatacagagaaaaagtaatatgaggacatttcaagataaaaacaacctgagagccaggcacggtggctcacccctgtaatcccagcactttgggaggccaaggtggacatatcacttgaggtcatgagttcaagaccagcctggccaacatagtgaatcccgatctctactaaaaaaatacaaaagttagacagggtgcggtggctcatgcctgtaatcccagcacttagggaggccaaggcaggtgtttcacaaggtcaggagtttgagaccagcctggccaagatggtgaaaccccatctctactaaaaatacaaaaaaaattagccaggcatggtggcagtcccctgtaatcccagctactccggaggctgagacaggagagttgcttgaactcgggaggtggaggttgcagtgagccaagatcaagccactgcattctagcctgggcgacacagctagactccatctcaaaaataaaacaaacaaacaaacaaaaaaaaattagctgggcatggtggcacgtgcctgtaatcccagctactcaggaagctgaggcaggagaatcacttgaactcgggaggtggagattgcagttagccgagatcacatcactgcactccaacctgggcaacagagtgagactttgtctcaaaaaagaaaagaaaaacctaagaactttccaaatgttgatgtgataaaaaaatatttctaaccaataatacttgatccaaaattattttactttaaaaacaagataaaaataaagactccataataaaaggtgtgggtgttcatcactacaagcacagtcctatgaaaagtactacatggtgtccaggcactgtggttcgggcctatgaatcctacagttttagcaggccaaggcagccagatcacttgagaataggagttcaagatcagcctgagcaacatagtgagactctgcatataaacaaagagaaatattaaaatgagtccatttttttgaaaattaaaatgatgctggccagcatcataaaaccatatataaaataaagctctctattaaatgtaaatatacagacacatatagaattatttactatcataatgatggtacacaaaatccttaaactacttctatagaatatgaaatataaaatataaatctgttagtagatgcatagtataaaataatcttcaatatcaataactactgaaaaatataaaggtatagcttttgtattaaattgaagttgttacgagattaaaatatatcattttagttttggctgggtgctgtggctcacatctgtaatcccagtactttgagaggctgaggcgggtgtatcacctgaggtcagaagtttgagaccagactgcccaacatggcaaaaacccatctctactaaaaatacaaaaaattagctgggtgtggtggcaggtacctgtaagcccaggtacttgggaggctgaggcaggagaattgcttgaacctgggaggtggaggttgcagtgagccgagatcatgccattgcactccagcctgggtgacagagcaagactgtgtctcaaaaaaataaaataaaatatattattttcatattaaaatgttttatgtaatctccatttctcaagacaattacaaagataatatttatcgaaagtataaataaggaaatggaaaaataaccaaagcatatcactacatagaataaacaaaaataaaagcagcacaacaagaaatgagaaaaaaaaatctacaagaaacacataacaataacagtaaaactggtaatagcaactctattttaaagcaatcattttaaatactaattaattaaactacttaatagaaagaaacataatcctaggatgttgtgaggtcaaagtgggctgatcacttgatcccaggagtttgagatcagcctgagcaacatctcaaaaccctgtctctacaaaaaaaaatacaacaaaacttgctgggtgtgatggcaaatatttgtaacacagctatttgagaggccgaaatgagaggatcatcagagtttggaaagttgaggctgcagtgagccatgatcatgccactgaaaaccaggctgattgacagagtgaaaccctatttcaaaactgaatgaataaataggccaggcatggtggctcatgcctgtaatcccagcattttgggaggccaaggtgggtggatcacttgaggccaggaatttgacactaccctggccaacacagtgaaaccccaattctactgaaaatagaaaaaattagatgggtgtggtggcacatgcctgtaatcccagctacttgggaggctgaggcatgagaatcacttgaatccaggaggtggaggttgcagtgaggcaagatcacgctacagcactccagcctgggcaatggagtgagatcctttctcaaaaagaaaaaaaattaaaataaatgaataaataaataaaattataaaaaagaaaaagaaataaaacatctgagtaactggaaaaaagcatacaatatgctgcctacaagagactggttttagcattgcattgaatagactgaaagtaacgtaatagaaaaaatttatttttcatgcatatagtaaccacaattgggtaaggtagttataattatattagacataatatgcttttagtcaagtactagcatgagaacaaaattgatattatataataataaaataggtcaatttaccaggaatctataactattatatctctctctatatatgtatgtatgtataaaacataagagctgcaaaatatataaagcaaatactgacaaaagtgaagaaatacttagcaacataataactgtaaacatcaacaccccatttgccataataaataagaaaataaaaaactcagacattatagactgtattaattattttacctacagaggaatacctgagagtagataatttataaagaaaaaaggtttatttggctcacagttcagcagactgtacaggaagtgtgtgccagcatctgtttctggtgagtaagggtcctagtaagcttataatcattgtggaaggcaaagtataagtggacacatcacacagtaagagacagagtaagtgtgaggtgaagaagccaggttttttttttttttttaaccaaccagctctcatttgaatcaatagagcgtaacctttttgattatcaaaaggatggtgccaaaccatttatgaggaatttgctcccccatgacccaaacaccacccaccaggtcccacatcaaacaggaggattatattgcagcatgaggtttagagaaaatggacatcctctaaccttaggccaaccatatcatatcaccaactaggcttaacagatatgtacaaaacttaccaggcaaaagcaagagaatacacacaatattcttacttgctcctagtgtgttctgttacgacacataccaagtcttattaaatttatgaatactggctgagtgcagaggctcatatctataatctcaacactttgggaaaatcacatggggcaaaaagtttgggaccagcttacacaacatagtgagaccctgtcgctactaataaatcaaaaaattaaccaggggtagtagtgcatttctgtagtcccagctcaaaaatttgaggtaaaaggatcacttgagcccagcaggctgaggttgcagcgagccaaaatcatgtcactgcactacagcctgggcaacagagtaatatcctgtctcaaaataacaacaaatacatttaagaagaccaaaagtatacactatgttttctgaccaaaactgaaagaaactaggcattaaaagccaaagtaaaactgggaaatccaaaaatataggaaattaaaacacactcttcaacagattcttttttttttttgagatggagtctcgctctgttgccaggctggagtgcaatagtgtgatctcggctcactacaaactctgcctccagggttcaagcaattctcctgtctcagcctcctgagtagctaggactacaggtgcgtgccaccacgcccagctaatttttgtatttttagtagagacagggttccaccaggttggccgggatggtctcgatctcttgaccttgtgattcgctcacctcagcctcccaaagtgctgggattacaggcgtgagacactgcacccagccacttttcaacatattcttgctccagggtcaaaaaatttaatttttcaaagacattactatgacctaacagtggtgaatgaatttaatataatctctataaaaaccctaatcacacagttttttacagaaatatagtttatttttttatttttattttttttagatggagtctcactctattgccaggctggagtgcagtggctgtagtggcctgatctcggctcactgcaacctctgcttcctggattcaagtgattctcctgcctcagcctcctgagtagctgggaatacaggcacccgccaccacgcccagctaattttcgtatttttttttagtagagacgggatttcaccatgttctccaggatggtctctaactcctgacctcatgatctgcccgcctgggcctcccaaagtgctgggattacaagcgtgagccaccgggcctggcctaaaatttttaaatttgattacaaactatagataaacacccttgaaaaagaacaaagaggcattatactttctgatttcaaaacatattaaaagctacaacaacaaaacaatgtggtactgacacaaagataaacagatgaaagaacagagagcccagaaatgaactcttctgtataagataaaataaccttccacaaagttgccatgagcatacaataaagaaaagatattctcttcaaaaaatattgttgaaaactggaaagcgacactgatgaaataaagttggatcatttccttgaacaaaatacaaaaaatatggtttaactaaatacttaaacatgaaaagataaataacatctcttagaaaaaacataggaaaaagtcatgtcattggtcttggcactatttttttagatatgacactaaatgcatgagcaacaacaacaacaacaataaccattaagatttaactgcattatacttcaaaatttctgcacatcaaaacaaaaattcaatagacaatgcctcctagaaaatgggtgaaaatatttgcaaatcacaagagatgagtgatgagttaatattcagaatatataaacaactcttaaaactgaacaataaagctgaataacttgatttattaatgaaaaaataattgaactgaattttcatttaaaaagatacccaaatgggaaaaagtatttgaaaagaaaagcaaaattaataatttatagagaaacacataaaaaagaaaaatgaaatcacctcacacccattacaatggctactgtaaatttatgaaaaacaccaaatctgttgataatgcaatgaaaataaaacccctgttgattgttggtagaaaacaaaagagcagctattgttttaaaatgttacaaatattggccgggcatggaggctcaggcctgtaatcctagcactttgcgagaccgaggcaggcagatcacaaggtcgagaattcgagaccagcttgaccaacatggtgaaaccccatctctactaaaaatacaaaaattagccgggtgtggtggtgcacacctgtaatcccagttactcggaaggctgaggcaggagaaatcgcttgaacccgggaggcggaggtttcagttagctgagatcaggccactgcactccagtctgggcaataacagcaaaactccatctcaaaagaaaaataacataacataacataacataacataacataacataacataacataacataacataaaacataacataacataacatacataaaataaaataaaataaaatataaaataaaatataaaataaaataaaatataaaatacaaaataaaataaaataaaataaaatataaaataaaaaataaaataaaataaaataaaatataatataaaataaaataaaataaaatacaataaaatacaataggaattacaactatccaagccccttgtaaccagccaactaaaggtggaccccagcacagaaactgcaggcttgagaccaagctactacccctctccacaaacccagagggcatcccagaaccctggcagcccaaaaaagaagatcttgtctgggcgaagtggctcatgcctgtaatcccagcactttgggaagctgaggcgggtggatcacaaggtcaggagttcaagaccagccttaccaacatggtgaaaccccgtctactaaaaatacaaaaattagctgggcatggtggcacaagcctgtaatcccagctactcgggaggctgaagcaccagaatcacttgaacccgggaggcggaggttgcagtgagccgagatcacatgactgcactacagcctgggtgacagagtgagactcagtttcggaaaaaaaaaaaaatctttaccttctgaaatcagtttatcagtttataaaaagttgaagaggcatttgcattttcaaatttacagacaccaatgccaaactatattgtgcccacttgtcaatgcttctcttttaacataacactgaaaatatgtggcagaagaattagtcaaaaaataaaaaacccattgaaattgaagacaagtaaaatgtttgtttgtagatcataaaatcttacatataaaaatacataaacagtacattaaaacctatctaataaatacactcagtaaattaccaaatataaactcaacttataagttatcattctataaacctaaattgtctaataaaataaaggaagaaagcaatattatttataatagcattaaaataatatatttctgagaacaaattcacccaagaaagtgaaaaaaatctttacaataaaagatataagatttcaatgatgaaatcagagaagacacaagttttaaaatatttaatatctatggatttaaagaataaatattgttaaaataccatattatccaaagtgagctatagattcaagaaactccctaccaaaattctagtggcatttttttcatagtaatagaaaatacaatccctaaatttacatgaaactataataaatcttttttttttttttttgagattgagtttcactcttattgccaaggctggagtgcagtggcacaatcgcagctcacagcaacctctgcctcccgggttcaagcaattctcctgcctcagcctccagagtagctgggattacaggcatgcaccaccacacctggctaattttgtatttttagtggacacggtatttcaccatgttgttcaggctggtcttgaactcctgacctcaggtgatccacccatctcggcctcccacagtgctgggtttacaggagtgagccaccgtgcccagcccagtaaatctttttaagagacagggtctccttatgttgcccaggttggtatccaactcctaggcttaagggatccttctgccttggcctcccaaagtgataggattacagctgtgagccactgcccccccagccaaaactacaagaaactgaatagtcaaagcaatcatgaggaataagaacaaagtgaacatcatacttttaaatttcaaactatatttcaagcctgtagtaatacaaataagatgaaatgtgcagaaaaataaaaaaaacaatggaacagaaaccacaactcttacacatttcagacatgatgcaaaaagagaacttacaaaatagtttaacacagagtttctcaaaattatgcagatatttctgagtctccaaaaacaatggaaaaaaaaagtcagattgtgcaatctcttatatgccatgaagaggactttagctcactgtaaacttgaaggaagatcgctgaagggaaagtagaatttttaaagaatttaaaagcataagacagaagacgcccctatattaaagttaaaaaaacaaaacagctgcctagaaactttggaacacagatttccaagtcaaattttaaggactggttttctcttttacctttggacctcacatctgtgtcatctgttgtgttcactctcacctacctgggggtttggctgccatctcgtgtctcttcatattccagggctcttttccttgctccagacaggtgatcaggtctaaattagacacagcaatacctgttttattaaaaataaataacgtgaatcttgctcatattctccaattaccaacctagtaattttctcagtaaagagaatgtaggccaggcacagtggctcatcctggtaatcccagcactctgagaggccgaggtgggtagatcacctgaggtcaggagttcaagaccagatgggtcaacatggcaaaaccttgtctctactgaaaatacagaaattagctggatatggtggtgcacacctgtagtcctagctactcgggaggctgaggcaggagaatcactagaacccaggaggcaaaggttgcagtgagctaagattgcaccactgcatccagcctgagtgacagagcaagactccgtctcagaaaaaaatattttaaaaagagaatgtaatagaatattctagtatattaatcacaaaatatattctagtaaattaatcacaaaatactaacttataacaaaatttctaaatattaagaaaatattttcaatttgtatgttcttaattttactactcagtgctactgaatcaaaaattggtggtggcaattagattttaaggtgtgggcaacagtattttatgccactaaatttctggaattaccactaatctagagtgaaggatacagatcagctcagaaacgtggaaagttcaggtcagggtgaaacatctacacagataaatcctacattttcttaaaaacaggtagttgaaactcatttatgtaagcataaattgccaaaaaaacacgcaacaaaaaagagaaataaaacctttagagtatattaggaattgtatattaaagttatcctcaccttgccgggcaaggtggctcacgcctgtaatcccagcactttgggaggctgaggcgggcagaccctgaggtcaggagttcgagatcagcctgaccaacatggtaagaccccatctctactaaaaatacaaaaattagccgggcatggtggcacatgcctgtaatctcagctacgcaggaggctgaggcaggagaatctcttgaaccctggaggcaaaggttgcaatgagccaagattgcgccactgcactccagcctgggtgacagagtgaaactctgtctcaaaaaaaaaaataataataaataataaaaattaaaaaaaaaaaaacttatcctcacccaggaataccaggtttctataattctctaacatgacattcctatataaattctgctgtgctgtgtccaggcactgccactcctccagagagaattctatggccacatccataaatgtcaatggtccctgaaaaacacatacacacacacatatttaccaagtggttatggacagaatttttaatttgactcaaggtgaaatgagagagtaaagagaactggttctgacttataggagtgactgaaattatccaataaaataattttcaacacagaaatattctcgaatgtattctctaactctgaaaaaagagagtagtataagatccacaaaatcagtgtatatatgttacttttctgaatgataaagtataaacttaagggcatgaacagaaacatgtacattttttattgctatatatacatcatacagaatgacttgtgtatatttttcagatggaaaagacatgttgagttagaaagtgcttctcaaattttagtctgtaaaataaactggagatcttgttagtggagattattttttcagaagatctggaataaagtctcagtttttaaatttctaacaagctcaccaataattccaatgtttttggcccaaaaagaatattttgtcaaacatcccgtaagtaaaagggcctgtgtttttttcagttttacttacctgtacagaaagataagagctttcattttccaaagacatatgtatacaaggaaaacctaagaaaaagtcagctcccagataaaatatgatgatttatgcacattagctgcataaagatacttaataatgaacagaaaaataattaactctatggtgaaaaaatctttcagagagctctttaaccaaaagacttattttgtctttttttttttaaccgaaagaattattaacatcaactgcactaggacaaatttttatgatgtgctaatgcataacacagaaggacacagcaccactgctggaatattccccccaaaagtgaattatagtctgaatttaaccataaagaaaacatcagttctgtgcaaagttcaagataaacatatctttcccgttttaatttttaataatgattttaggtagacatcttgagaatatgcctttaaaggtgtcagcaccacctgtttacctgataccaccacatccacaagcaaaaagatgaagacttgcagaaaaagtccacccatttctgtccttaataacagaagagatgcgggaaaaacacgctgcaccatggaaataaagatataagtttcatttttcctgtcctcaggtgcccttcccttacatggacaccaacaatttctgctacagtaataaaaatatggaccacactgtcctctccctaccaaacccaaacagaaacagccctatggccacccttttagtgcaaaggtgagacttaactcttatgaatgtatctgaacccctcatactcaattctagcctcatgttaaaatcacatgaggcacttaattaaaacaacatggggccaggtgcggtggctcaagcctgtaatcccagcactttggggggccaaggggggtggatcttctgaggtcagaagttcgaaaccagcctggccaacatggtgaaaccctgtctctactaaaaacacaaaaattagctgggcgtggtggaacgcgcctgtagtcccagctactcgagagggtgaggcaggacaatcgcttgaatgtgggaggcagaggttgcagtgagctgagatcgcgccactgcactccagcctggtgacagagcgacactccatctcaaaaaaaaaaaatacaaaaattagtcaggcacggtagcatgcacgtgtaatcccagctacttgggaggctgactcaaggagaatcacttgaacctggcaggcagaggttgcagtgaaccaagatcaagccactacactccagcctgggagacagagtgagactccatctcaaaacaaacaaatacaacatggatgtgtccacctggagcaataaacagagcctgtgaggaggggtgaagtacagagatttctgcaaactggctgtgtaatcctaatgagaagcctgggctgataaccacttagccaagcattgcctctcaagctttagtgagcttaaaattcacttggtaattttggacccactctacgtaatgggattctgcaggtttggaaaggatccatggataaatgttttaaacaagacccctgtcaatgttaatgttgctcccccgggctcattattagcagtagttagagaaagcaggcacagcacagagtcccttacactcagcactcttgtcacaacacaagtatttctggtacaaataaagacaacccatcttcatcctaaagtttcatattatttgctggctcttcaaagtttacaaaggaaacagaaggcagcaatgtctgaataagtctgcatttggaaaacaacatgtactaatgcaaggtgtattaagcaggcgctatgtgctctcaagggtatgctacaggctgagtgcagtggctcatgcctgtaatcctaggaggcaggtggatcacttgagatcaggagttcaaggtcaacctggacaacatggtgaaacctcatctctactaaaaatacaaaaaaaaaaaaaaaattagccaggtgtggtggcatgtgcctgtaatcccagctactcaggaggctgaagtgggagaatcgcttgaacccaggaagaagaagttgtagtgagctgagattgtgtcactgcactctggcctgggtgacagagcaagaccctgtctcaaaaaaaaaaaaaaaaaagtatgttacagagcactgtgctgggaataacatattatatgatttaactctcataacatcatgcaagttggtactaagtgtttaataattaccaggatttagataaagagcccagcatttttaactcttctactgtttctctgtcattggttttttaaaaaatgtgtagaaaagccaggcgcggtggttcatgcttgtaatcccagcactttgggaggcccaggcgggcagatcatgaggtcaggagtttgagaccagcctagccaacatggtgaagccccgtctctactaaaaatacaaaaattagctagtcatggtggtgggtgcctgtaatcccagatactcaggaggttgaggcaggagaattgtttgaacccgggaggtggaggttgcagtgagccaagatcatgccattgcactccagcctgggcaacagtgcgagactatgtctcaaaaaaaaaaaaaaaaaagtgtgtagaataaaagcctaatacagacagatgagaggattacagaaagagtttaatgtagttttgaggaatttttactgggtttatatttacttttttgtgacttgtggaacaactactgaatctgcaggaatagaaaacaagttcctaaatggaatgtttctgcaaccttggttttaataaaaaattaagaaattaagaccctaaaatacatattttacttttcccatttatctgcttttgggtttcaggaaattgggagcaccagctctagagaggcagcagaattcaacaaccaaaactctgatctcttctgatcagttctgtgaggcaagactccagggctgggtgagatctaaacaaggccctcaagaagggtgaatctgaacagaactggggaaggggagaccctctgtagaattctgttctctatgccactggggtatttcaagttctgttttttgtaagcttacctaagagaaacttaaatcccagcgtttgcgtaattttaatcttttctagccactgccctgtcaattttataacatatactaataagcaatttaaacaaatctcttaaggttttctagggtaatattattagaagataaatatgtattattagcaagataaaagaaatcaaaaaataataatgcttctgtccataaatatcccttcaagtgatgacatcagaagccacaacaatataaataaagtggcccaaataaagctcacaattttttcacacatctatttgctataccaaccatatgatacttaattcaaccatttattcagttgctagtctagactaagagtttctggattgtagaaaccatgactgcttcatctatttttctaatggccatataaaattatagcaatcagtttatctgcttgagtctccagatctcctccttgtttttacccaagtaccagaaaactggagaaattcatctgggtaccaatcaaaaacatcccttgtataagggaaggaacaaacacaggatgactcatttctcttacactgagggaaaagcagaattaaccactcttgtcagcctgacacaattctgctctggacatcctcaaatgtctcaaaaatgcctacgtaattgtgagagggttcccagtgaccctgggctgatggtccaataataagccaggctagagagagtcatgctgattctaaatagaaaatggaactgccctggttgagctccagaattacttgttctgattaactagcttttggatagaaggaaggacaagaatattgtacataacattttacaggcaggtatagttgtggtcatggctccggatactttgtggtcttgatctctcactcctaagatgtttatttatatttacagaatttgccatcagattctgtttacatctggagcctctcacgtaactgtggcagacctgctacaagatcttactggacaaaatctgaaaagctcaaagagccacagtctcaaagggagctgtaggatgtctatgttgacatctcacagtgcagaaaatgccttctattggttttcagtacattcccaattcaaagtctggccctgtcttgtaatcccaggcagaagccagatcttatgtgcagattctaagtgggatcaacctgactctgcatccttaggtgttacagaaagcaaagtacaatcaaaggagagatcccctcagaggccgctctggcacgttccaaatgatgtttacctaaaaggaaatagctgaggaaacatgaatgtaagtatacaatttatttgggccaaacttgaggattgtaacctgggagcaaatattcaagttgcctggaatatatactttgattagcagcagttacaattggattggaaagacaaaaagagaggcgcatagagtgggttgatacaaagttgtctgtcaacatttttttatttacaaaaataaattgattattgattggatatacattgttaggctatagggtgtgggttatagtgtccagtgtggcatttttagttcaatttatagctacttgtggcaatagcaagcagtttcaagtggtaactacatagctcaaagaaaaaagaaagacataattgtggtctcattttaatgtctctctgagacttataaagaaaaggattattagccaggcatggtggtgcaggcctgtaatcccagctactgagaggccaagacaggagaatcacctgaacctgggaggcggagattgcagtgagccgagttcgtgccattgcactccagcctggacaacaagagtgaaacctgtctcaaaaaaaaaaaaaccttttatataggaaatgcaaatccttttcttttcttttcttttcttttttctttttttttttttttttgagacagggtttcgctcttgttgcccctgctggagtgcagtggcgcaatctcagctcaccgcaacttcctcctcccggattctcctgcctcagcctcccgagtagctgggattacaggcatgcgccaccacgcctggctaattttttgtatttttagtagagacagggtttctccatgctagtaaggctggtctcgaactcccgacctcaggtgatccacccgtcttggcctcccaaagtgctgggattacaggagtaagccagtgggcccggcaaagttttcattttttccaagcctcaagatctagattcagaaattggagctgcagattcagattctggatgggtggagtagcagcaggtattacttgcacatttgtggacattttagcaagaggagaaaaaaggaattaaaaattctcatgtctacatatctattcaatgcacacatgttattctgctagggtttttgggccccatggtctctgagtcagcttcaggtctgatgacaggagtccctgaggctgggcacggtggctcacgcctgtaatcccaacactttgggaggctgagatgggtggatcatgaggtcaggagtttgagaccagcctggccaatatggtgaaatcccatctctctttttttttttttttgaaacgaagtttcgctcttgttgcccaggctggagtgcaatagcacaatcttggctcactgcaacctctgcctcccaggttcaagtgattctcctgcctcagcctccccagtagctggcattacaggcgtgtgccaccaccctcagctaatttttgtatttttagtagagacggggtttctccatgttggtcaggctggtctcgaactcctaacctcaggtgatctgcctgcctgggcctcccgaagtgctgggattacaggtgtgagccaccgtgctcagcctttggtgaaaccccatctctactacaaatacaaaaaaaaaaaaattagccaggcatggtggtgagcatctgtaatcccagctacttgggaggctgaagcaggaaaatcacttgaacacaggagactgaggttgcagtgagctaagatcatgccactgcactccagcctgggcaatgcagtgagactccatctcaacaacaacaaaaaagtcactgaaagaggtaaaatggttgattgctgccctgtaaggtttgtagaaatctgatctagcctctctggaagtgactgtagaggacaatagataccaaataggcagagatgcaattcttcctgcatatttagggaagagcgtgcactttgcagcacaattgtgagttgactggaatcctgagagggaaaggcccttctagagtaaagcttggttgacaccttatatatttatatcacgtctggtaattctagactgtgtttggaaaatataacaagagaaattatctccagccccagaaaaacttcacaatgatggaaaagaaagaaaacttttattacacaattaaaccagaatgtgacatgcatcacaatcaatctgcttaagagactgcaaagacagaaagatagtcaccataattagtccacaagtcgaagaatttacagcaccatgtcatacagagctcatcctaaattcacctggtcattggggatgccacctatctatgctaattggttataatcaatgacaaaataaacttttcacatcttcatgacaggaggtagttttgcaacttgacaccaggtgcctgctgaaggtagactctcagtctcctactacaatggttgaatagggtgctatctttttggttatttacactttaaagcaatggctctctatgttctgagcactcagctacagcactcctgcttgccgtctacttatggctagtgtcctctcttgacccctaccatctgccaatgaggcacagcccaaagcacagagctcacagctggcagcttacatcttaagtgagccccaattgccacagcagcactccagtacctcatcagagactgaagactatggtacaggagagcctacaggatttgggggtagaattgcaccttcataataatgggaatgggagtggtgtttcagcctcagtttcaatttattatggtgacttgaaaaaaatactgctggatttccagcatgagtccagatagagataggatggttctccctgtgaaaacccacctctttgtcaacaccaagggatagcattagggcttctaaaacagacatctgaagcattgaagagaaaaacagctcttggtctgattctactgcaaaaattatattgagagaaaaaagaagttaaatgtatcttgagaaaaaactcagattagatatgattgatcaagtcagtcagaaaatattcccctaaaaggaatttctcttaaaatacccctaatgcacagctactcttggcatgagaaacatgagcattatgaagaaaaaaagcatattctcagcagaattttataaggtttctcttccatctctgctgctctcatctcctagccattgaatgggggttccatattgaaatacaactgacaattcaccagcactttttaaattacgaactggaatctgactttgttcatatagtagaatatatgtgagcttgccgcataactaactgaagggctattatggtttttgggtgaccacatcacctgtctatttgtcctggaatggcagcattccaatttagtaaaatgaaagacactaaaattatgcttacctataactatccctattggataaaacaatatgtatgtcagacacatatctactgtaacaatttggtagtattttttgatattagctatataaataaatataaataattttaatgtactagtcataatgtatgtaggatttttaaacattgtctataaccataattcagtttaaacattttatatttcagaagtataaataacaatattaaaatgactgcttaggagattcaaagtaaatattttgatcttatattcatactattgtagaaaatactttttaatttatatgaatgtatgttgtctaaaaacacttcagataactatgctaattgttcttaataaatagaaaccaaagtacaactacaggctccacttttcagtttatacactgaactgttcttgtttttgcagtgtaagtacttcagcctgcaaatattagataattactttggataattagtgttctgtaaaaggaacctagtatgttttagtccttattattctgtattgctaaatttactcctatcattgtgttcaatttgtgtgtgctcctaatatgagttttttttttttaattttttgagatggagttttgctcttgttgcccaggctggagaggaatggtgtgatcttgtctcactgcaacctctgccttctgggtttgagggattctgtatcaacctccggagtagctgggattacaggtatgagccaccacgcccagctaattttgtatttttagtagagaaagccacgcgtggctgaacagatgcttttccaaacaagacatacatgtggctaacaagcatattttaaaaatgctcatcactaattattagaaaaatgtaaaaaaacacccaatgagataccatctcacaccagtcagaatggctactgttaaaaagtcagcaatagatgctggcaaagttgcagaggaaaggaaatgcttatacactgctggtgggagtgtaaattagttcaaccactgtaaaaagcagtgtggcggccagacttagtggctcaagcctgtaatccaagcactttgggaggcctaggcaggcagatgacctgaggtcaggagttcaagaccaacctggccaacatggtgaaaccccatctctactaaaaatacaaaaattagccaggtgtggtagcgggcacctgtaatcctagctattcaggaggctgaggcaggagaatcgcttgaacctggaaggcagaggttgaagtaggccaagatcatgccactgcactccagcctgggtgacagagcaagactcagtcaaaaaaaagcagtgtaacaattcctcacagaactacagaactaaaagcagaattaccatttgacccagcaacctcataacttggtatatacccaaagaaatataaattagtctcttaaaaagacacacacatgcacatgcatatttattgcagtactattcacaatagcaaagacatggaatcaatctaaatgcctatcaataatagactgaataaagaacatatggtatggtcggacaaggtggctaacacctgtaatcccagcactttgggaggctgaggcaagttgattgcctgagctcagaagtttgagaccagcctgggcaacatggcaaaaccccgtctctacaaaaaaatacaaaaagaaacattagacaggcatggtggtgcatgcctgcagtcccagctaattgggaagctgaggtaggaggactgctcaagcccaggagattgaggctgcaatgagcagtcatcgcaccactgcactccagcctgagtgacagaatgagaccctgtctccaaagaaaaataaaataaaagatctaataaaaacaaaatatggcacataaacatcatgaaatactctctggccattaaaaaaaaaaaaaaaaaaagaacagcattatatcctgtgcagcaacatggatagagctggagaccattattgttagaaaagtaatgcagaaggctgggcgcggtggctcacgcctgtaatcccagcactttgggaggccgaggcgggtggatcacgaggtcaggagatcgagaccatcccagctaatgtggtgaaaccccgtctctactaaaaatacaaaaaattagctgggcgtggtggcgggcgcctgtagtaccagctactgtggaggctgaggcaggagaatggtgtgaatccgggaggcggagcttgcagtgagcagagatcgtgccactgcactccagcctgggagacagtgagactcatcttaaaaaaaagaaaagaaaagaaaagaaaagaaaagtaatgcagaaacagaaaaccaaatgcatgttctcatttataagtaagagttaaataataagaacacatggacacaaagtggggaacaacagtaactgaggcctacttgagggtggaaggtggaaaaacaaagagggtgtgggcattgtggctcacgcctgtatgccaccacattgggagaccaaggcagatgaatcacttgaggtcaggagttcgagaccagtctggccaacatggtgaaaccccatctcaactaaaaatacagaaattagcctggcatggtgatacacagctctaatcccagccactcaggaggcaggagaatcgcttgaacctgggaggcggaagttgcagtgagccaagatcatgccactgcattccagccagggtgacagagcaaggcttgaaagaaaaaaagggaagagaagggaagggaagggaagggagaggatggggaggggaggggagggggaaggagggagggaggtgagagagagagagaaaagaaaaaagaaggaaacaaagaaagaaagaaaggaaggaaggaaggaagaaagaaagggaaaaggaaaagagagagaaaattagaaaaaaatacctatttggtgctatgcttagtacttcagtgaaaaaataatttacacaccaaacattcatgacacgattttacctatattacaaacctgcacatgtaccaatgaatcaaaaatagaagttaaaaggaaaaaactccatggataagggagagtgcaatatagatggaaggactggtttgtgcctgggtggggctgtactctaatttatttctctgttcatacaggcaggtgagattatgaacaggtggtccagaaccctaggttggtggagaaaacaggttgctggtgcagattcagtgtctgggggtgcggatatgccaggagacttgtagacatgtttgtgagtttgtagcaagaaacaccaggatcaaaaatgctgtggtaaaattcctgagggtggtgcctagtcctgggaataagtgtggacacgtcaatgtctaatgggtatgtttgtgagtggctgggaatcctgtggtggcagctgtgggaaaagggggtctgtcatcagagctcatattctttttttttctttctttccttttttttttcttttgagacagagtctagttctgtcacccaggctggagtgcagtggcgcaatcttggctcattgcaacctctgcctcccgggttcaagtgattctccttcctcagcctcctgaatagctgagattacaagaacgcaccaccatgcccagcttattttttctatctgtagtagggacggggttttgccacgttgcccaggctggtcttgaactcctgagctcaggcaatccacccgcctcggcctcccaaagtgctaggattacaggcgtgagccacggcacccggccagagctcctattctctaatttttcagtcctctctcaccctgggagaactgaaatcacaggacaatgggcagtgtgacagcctgtgtacaggagagcagagcgtcccattcccagacatccagagttttattccaggtcaggcccccgtatcttttttctggcaccaaatctgcagtttactgaaaaccaagcaattctctaacactaactcattgtctaacattttatttctgacaccacccagtgtcagcacaggccctgactcagtcccacactgtccttacggcagatgccaggcacaaactccatgggcccatttacatttctgagctactgtttaaaaattgaggactcccataacctttttcaagttcaataatttgataaagctactcatagaactcagcaaatactgtagttatatttaccagtttattataaaagatacaacccaggaaaagtcaaatggcagacatgtatagaacaaagaaaggtggggaaagatgacacacatagacaatccagataaataactgtgattaataaaattcttcattgtttgtgttctccaggaacagtttatcgaaagaaacacccttcccattatgacttagatggtgctctcttttcttatctatcacatagcagacaccgactctgcacattttttttcttattgaaaaatcagttgaatttgacttcagtggtgaaaataaaatacttcttaaggaaactttacttaagtttgtctttttccccaaggcttctgaactttacaaacccattttatgtaactccaaagaacaggctgacttcagtgtgaaacattctctgatctaaaatctgattttttcaccctgcatttgccattccccttccacctcctttctaatcttgtttgttcctccttaggaaaggaagcctttgtctgcctgaactttgcaattcttaaagaccttgtagttggtacttctgttgcaatatttctttggaagtcaaaatttttatgtaaattcaaccttgttttattttcaaagtctataaactgcctcaaaacaagaacaacttcatcttcagtaagaccctcccaatcccctttcattttaacatcaactgcatccacctgtgggtccccagctttccagggctctgtagcttctcccaggataaagacttctatggctggggtgagcaggctgggatatctacagaggagactccccagaaaaaactaactgggcctttaataaaatttttttgcaggctcaatattagccttagctctgagccagtgggctaaagctttaatttccatgtcaagagttattcacttggtctttgaaacttaagtgtttagccgggcgcagtggctcacgcctgtaatcccaacactttgggaggctgaggcgggtggatcacaaggtcaggagatcaagaccatcctggctaacatggtgaaacgttgtctctactaaaaatacaaaaaaaaaaattagtcgggcgtggtggcgggcacttgtagtccctgctactgggtaggctgaggcaggagaatggtgtgaacccgggaggtggaccttgcagtgagctgagatcgcgccactgcactccagcctggctacagagcaagactccgtctcaaaaaaaaataaacttaagtgtttaaaaaatccagcgtttcttggctgggcgcagtggcttacgcctgtaatcccagcactttgggaggccgaggcgggcagatcacctgaggtcaggagtttgagaccagcctgaccaacatgcagaaaccccgtctctactaaaaatacaaaattaaccaggtgtggtggtgcatgcctgtaatcccagctactcaagagactgaggcaggagaatagtttgaacccaggaggcggaagctgcagtaagccgagatcatgacattgcactccagcctgggcaataagagagaaattccatttcaaaaaataaaaaaaaaatccagcagtttctcaaacacagtgttgacataagagaagaaaattttagggtgcttatatttcatatctcaataagaaaagcaaaagtgtccattcctttcaaacaataaatgcattattttattatttccattaaaagtcatatagtaaacaattagtcatatggaaacatgtctaggaggtaccaagtttcaaataaaatttagcttaaaactaggaaatcaagataacaggatttgaacagagatattcactgtcacaaatttaccctgcaaaaagaggagctgatgctttcatgaatctatgtaactcagcaattatctaccacattttcttgtgaaaatgtactcattttctacagccaaaatgggaaagacatttcccctattctttttcttggtagcattcttaaacagccttgaaattttattggaaattaccaagccataaaaaatacacctgacactgatgaaagaaatcatagatggcacaaacaaatggaaacaaatcccacgctcatggataagtagaatcaatattgtgaaaatgaccatactgccaaaagcaatctacaaattcagtgcaatccttatcaaaataccaccataattcttcacagaattaaaaaaaattctaaaattcatgtggaacaaaaaagagcctgcgtagccaaaacaaggctaagcaaaaagaacaaatctggaggcataacattacctgatttcaaactacactataaggccatagtcaccaaaacagcatgttactggtttaaaaataggcacatagaccaatggaacagaatagagaacccagaaataaacccaaatacttacagccaactgatcttcagcaaagcaaacaaaaacataaagtggggaaaggacacccttttctacaaatggtactgggataattggctagccatatgtaggagaatgaaactggatcctcatctctcatcttatacaaaaatcaactcaagatggattaaggacttaaacctaagatcggaaactataaaaattataaaacataacattggaaaaacccttctagacattagattaggcaaggatttcatgaccaagaactcaaaagcaaatgcaataaaaacaaagataaatatcagggacctaattaaattaaatagtttttacacggcaaaaagaacagtcagcagagtaaacagacaacacatagagtgagaaaaaatcttcacaatctatacgtctgacaaaggactaatatctagagtctacaacaaacccaaacaaatcagtacaaaacaaacaatcccatcaaaaagtggactaaggatatgaataaacaattctcaaaagaaggtatacaaatggccaacaaacatatgaaaaaatcctcaacatcactaatgatcagggaaatgcaaatcaaaaccacaatgcgataccaccttactcctgcaagaatggccatgatcaaaaaatcaagaaacagtagatgttggcatggacgtggtgaacagggaacacttctacattgctggtgggaatgtaaactagaaaagccactatggaaaacactgtggagattccttaaagaactaaaagtaggattaccatttgatccagcaatcccacaattgggtatctacccagaggaaaagaagtcattattcgaaaaatatacttgcacacgcatgttcatagtggcacatttcacaatagcaaaatcatggaaccaacccaaatcctcatcaatcaatgaatggataaagaaactgtggtatatatatacaatggaatactacacagccataaaaaatgaattaacagcatttgcagtaacctggatgagactagagactattattctaagcaaagtatctcaggagttgaaaaccaaacatggtatgttctgttatgtgggagctaagctataaggatgcaaaggcataagaatgatacaatggactttggggatttgaggggaagagtggaagggggacgagggataaaagactacaaatttggtgcagtgtataatgctctggtgatgggtgcaccaaaatctcataaaataggctgggcgcggtggctcatgcctataatcccaacactttgggaggccatggcgggtggatcacttgagatcaggaatttgagaccagcctggccaacatggagaaaccccgttctctacaaaaaatacaaaaattagctgggcatggtggcacgcccacctgtaattctagctacccgggaggctgaggcagaagaattgcttgaacccgggaggcagaggttgcagtgagccaagattgtgccattgcactccagcctgggcaacaagagcaagagtccatattaaatataaatataaatacatatatatttgattatatatatattcacaaaaaatacatctgagaaaattcctaaacttactctaagaaaggaaaacttaaatgagaatttctcacaaataaaatacatgattaatattaattttttctgaaatccacctcttttatgccctctgttaatattttcttaccttccaagtcctattaataaaatgcaatttacagttaaataatggaagtcaacataagtgaacaaatcttttcaaggtgacaaacccagggagtggtagtgctaattagaaaacagatgtgtctagaccgggcgcggtggctcacgcctgtattcccagcactttgggaggccgaggcgggcggatcacctgaggtctggagtttgagaccagcctgaccaacatggagaaaccccatctctactaaaaatacaaaaacattagctgggtgtggtggcacatgcctgtaatcccagctactcgggtggctgaggcaggagaatcgcttgaacctgggaggcggaggttgcggtgacccgagatcgtgccattgcactccagcctgggcaacaagagtgaaactccacctcaaaaaaaaaaaaaaagaaaagaaagaaaacagatgtgtctgactgatattcacccaccccattctgctcaccttaagtgctcaataaccaccctctcaggagacattacactatgccccaggtgcattttactttgtaagttcttgcaccatctcacttgggtcaggtttttctttgtcttttgggatacttttttttttccacaaaatttagagaattcagggggcagaaattatttctgtgttttcccctcaataccagcatctgattggctgaccagcactgtgtctccaagaaatggaagctgggttgggtgaagacaatcttaatgtctcaaggggttagcttttcaaaggaagagtatgccaggagatgcctctcagccccagggcatccacctgctcccttgagaagctacactccatacctcaggttgtcctcagggagaaaaatgacccaggagctgatattcactagacactctagcagaaaaagtcatgatgtgtatcttggtttactccagacagtactgaaacccaggaccaggaaaaaactgaagggtggctgaagacacatcactccgtaaagtttccaaagaaaaaccttcacctgaaaacaaacattctgataagatttctgtgcctgaggaagataaaaaaaaaaaagccatagaaatttcataaaatacagtgtcagggaattattttttgctttcttctcatgagaaatattttcaaccagaaaacaattttaagtgccatccaatgctttgtcaaaaaatgattaactaaaatacagtatcaaaaatgtacactaaaggaaaaacagttgagaatgtgaattaggaaaggcaagctggcatttggaaatgtcagaaggaactagaaatttagtattttagtttatttgcagtttaaatctaactgcaggccagagttaggctggaggaatggggctgggaggtacacttgagaccccgcttggaacgcatgtgaaaaatgcaggggaaaatcagtcccctgtggagtgtgagaataattaagtggcaggcaattacactgaggaggctctagtccccggctttctacttaacagcaacagctacgtaaatgtacctaaccgattattaaatatagttttcttcatcatgcaccttataaaaagtctttccttcaagctcctcccatgaaccacaaactacaaaacatacttttgtgctctacaattattgaatcactctttgattaaattctttaatattttttgcgatgactgccacagatttttaataggagaaaataggaaccgggaaccccacagaccaaagctcttcccattcatgaacccgaccccaagtcaggattctcccctgaccaccctcccatggtccctgcacaatctgggagaggcgcggcgctgccggtgcagagccgcccagagagggctgcaggccagggcacagtcactgcgcagggaagagacaggacgcccgggggcccggctgtcggcgcagccgccatcttatggctgaaggggactgaggccgagctaggcaaggagaactcggagcgcagattgtggagatgactgcggggagtcctgagtcccgccacagccacttcccacaggtttcaaccagcccttcccctctctcgggatgtcggacggcactctcaccatttctaggcttccagagggtcctggagtcttagctgtggatctcccaatacctgcaggtcacagagccacagagtctgggcctctaggagcagaggacaaacagcagtgaagacgagaccggagctccggctgcagcaagagacaaaggccgcgccaaacccggaagccgccctgtccggtccagctgcgtgtctgagtgaactgtccccagctcagagtccctgattggataatgttaaaacccgccccttcaggccctgagggacggaagatgtgatcagatgctgggctgaatgaagtgtgacagcctatgctgcagccttttcaggcaaggcttcctccctgagctgagccaggcccacccgagagggtgtttgcctttaatcttgtgtataaggtcatatgcccttataaataatatgctatatggctattcacaaatgaaaagaatataataacccaattgttctaaaaaaaattttttttttgagattgagtttcactcttgttgcccaggctggagtgcaatggcgcgatcttggctcatcgcaacctccacctcgcgggttcaagcgattctcctgcctcagcctcccgcgtagctgagattacaggcatgcgccaccatgcccggctaatttttttgtatttttagtagagacggggtttctccatgttggtcaggctggtctcaaactccagacctcaggtgatcctcccgcctcggcctcccaaaatgctgggattacaggcatgagccactgcgcccggcccaactgttctaaaattttatattttgtgaccttcctgacttctggtcctttgagcaggcagcctgagattttaaaaaggaggcaattctctgaaataaaatgtgagccacaagttgggcgctgtacctcacgcctgtaatcccagtacttcgggaggccgaagagggtggatcatctgaggttcagagttcgagatcagtctggccaacatggtgaaaccccgtctctaaaacaatacaaaaaaattagctgggcatggtggcaggcgcctgtaatcccagctacttgggaggctggggcaggagaatcgcttgatcctgggcggtggaggttgcagtgagacgagatcacgccactgcactccagtatggacaacaagagtgaaactctgtctcaaaaaaaataaataaataaaataaaatcataaaatgtgagccacatgtaaattttaaattttctagtagccaaactttattttatatttttatttttttagacggagtctcacattgttgcctgggctggagtgcaatggcgcgatttctgctcactgcaacctctgcctcccgggttcaagcgattctcctgcctcagcctcccaagtagctgagataaaaggcgctggccaccatgcccggctaatttgtagccaaactttaaaaagagtttagctctatttttaaaaagaaacaaagaacaggtgaaattgattgtaacaatttaacccaatatatcgaaaatattgtcattttaatatgtgagaaatatgtaattattaatgaagtgtgtctatatatatggaactaaacctttgaaactaactcgtattttacctttctagcacatcgcagttcagaccaggcgcattccaggcagccagtagcaacacagggccaatagctgctacattgaagtgcagctctgacatcaggagggtgaacgacctgaacatcccttttctgccggaggtgaggagagagcctctccctaccaacatctctcttcggttctgagggtagaacagacagtggtcatagacagagcagagggcaggccgggcggagtggctcacgcctgtaatcccagcactttgggaggccgaggcgggcggatcacgaggtcaggagatcgagaccatcccggctaaaacggtgaaaccccgtctctactaaaaatacaaaaaattagccgggcgtagtggcgggcgcctgtagtcccagctacttgggaggctgaggcaggagaatggcgtgaacccgggaggcggagcttgcagtgagccgagatcccgccactgcactccagcctgggcgacagagcgagactccgtctcaaaaaaaaaaaaaaaaaaaaaaaaaaaaaaaaaaaaattagctgggctggtggcgcatgcctgtaatcccagctactcgggaggcagaagaatcgcttgaacctggaaggcagaggttgcagtgagccaagatcgggtcactgcactccagcctgggtggcagagcgagactccgcctcaacaaaaaaaaaaaaaaaaaaaaaaaaaagagcagagggcaacaggaataaaataaccataggtaaaccactgctgaccacctattgccctccttccttctagagatcagacagtgaacaaaggatgatggggccaaaggagaagagaaccctatgtctcttcaggcccgtccacactcttgacctccaatttttagatatgaaaaaaaaatagattaaaggcaagcttatcttgctatttggccttggccctaatggtcaggccgtggttgtctattttctcctgtggtatgagggactgtgtgggtataggcaccaatcacatgcatacaatgtctacgtgtatttctgcattactcaatattaccttacaagacatccaactctaaatcagaggaaaaaatagtacctttagagtgtccactgtgtgaaggtaagtagtactgaatctgtcattaaatcctggcatcctgtctgcactgggtgcatgtattagttagctattgcagcataacaaaccatccaaaacttattagctcataattgaaatggtcagccatttgggctgggctcagtggggccatttctctagtctcagctgagcatttttagacatgtatcatcagctgcttgttgactaagcagctgtgtttctgggagtgagcttctgcttctggagctgtcaacaggggcaactttttttctcctttccatggtatcttattctctgactggccaacgtgggtttttcccatggagatggcagcattctgaaataaaaacagaagcattcaagaccatttgagcctgggccccaaactagcccactgtcatgtccacaggtttctactgccctgagcaagtacgacccgccagatctagtgttcagaaaacagattctggatctcaatggaacaactgtaaaagcacctggcaatgggcaagaatacaggaggatgaaaaattgctaccattttggtaatcattattattctgccctttttaatgtatgtggtttatagaactcttccacagaaagaaatttgtccaaagactaacggctactaagtggctgagctgagattcagaataaattctgacttcaaagcccatgcaccaccatagataacaatattacagaatctgccctagtcctttgaaatcctggagagtggaacttctacaatagaggacagaggtcctttagattcatgcccatatggtactgtttattattgagaataattctctcaagaaattccagaagcagacggtggcttaaacctgtaatcatagtactttaagaggctgaaatggaagaatcacgtgagctcaggagttcaagtgcagctttggcaacatggtaaaatcttgtctccatgaaaaaaaaaagtttaaattagccaggcataatggtgcatgtctgtagtcccagctactcagttggctggggcaggaagattgctggagcctggaaggtcggggctgcagtgagccatgatgggttacaccattacacttcagcctgggtaatagagtgagaccctgtctcaaaataaataaataaatacaataaattacagaagcaatttgaaaggacataaaataatttggaaaaatagctaaggattgagtttatgaaatcaaagctggcagggcatcgtggcttatgcctgtaatcccagcacttggagatgccaaggtgggtggatcacctgaggtgaggagttcgagaccatcctggccaatcatggagaaaccccatctctactagaaatacaaaactatctggacatggtggtgctcacctgtacacccagctacttgggaggctgaggaaggagaatcatttgaacccaggaggcggaggttgccatgagtggagatcctgccattgaagtctaacatgggtggcaagagcaaagctccacctccaaaaaaaaaaaaaaatcaaagcccagcaacacattatatatttttcatcatagaaaaaatttgggctgggcacagtggctcacacctataatcccggcactttgggtggctgaggtgggtggatcacctgaggttaggagtttgagaccagcctggctaacatggtgaaagctcgtttctactaaaaatacaaaaaatcagccaggcttagtggcaagtgcctgtaactcagctactcgggaggctgaggcaggagaattacttgaacccgggaggctgaggttgcagtgaaccaagatcctactattgcactccagcttgggcaacaagagtgaaactccgtctcaaaaaaaaaaaaaaaaaaaaaagccgaacaacacattatatatttttcatcatagaaaaaattggaaaacttttaaaagaaaaaaaactttagagaaataaaattaaatttaacagagtttaagtgagcaatgaataatttgcaaatcaggcagactgtggatccacagtaggctcagtgagactccagcacagccacatggtagaaaaatatttatggacagacaaagcaaagtgacattcagataatgaaagtgaggtacagaaacagcaagattgattaaagccaggaatttgccttatttgaacatggtttgaacagttgatgtcctcttattggcaacaacacagcagttggtacaaaaatggattccagtctatttacatatccaattagatttccatttactatatattaaaaaacctattaaccaaaattaaacacaataggaaacagctttaggctataatttaataatttttcccttttggacatcttctcaatgttgagaaatagaccagaactttagataatgatatcactctgttaccataaaaaaaatgtacttatttaggctgggcgtggtagctcatgcctgtaatcccagcactttgggaggctgaggcaggcagatcacctgaggtcaggagtttgagaccagcctggccaacatggtgaaaccccatctctactgaaaatacaaaacttagctgggcatggtggtgagcacctctaatcccagctactcaggaggctgaggcaggagaatcccttgaacccaggaggcagaggttgcagtgagctgagatcgtgtcattgcactccagcgtgggtgataagagtgaaacttcatgtcaaaaacaacaacaacaaaaagtacttaattagtctcaaattccactttaaaatagcagaactgtggattttgaaaagtggaaacaaagacttcaggttattagttttttaaaggattacagtagaggggacctccttgtgttcaaatctgctgtttacaaaagaaaagcaaaacctggcctgtagattctaaagatcttcctatttccttaaattttcagtttgattgtgtcacatttaccatgagtgactccatttggtttggtttggtctgtttgggcctagtgcacaagcttggtccagaatgatggccttcaataattttgtttaaaacattttctcctttaggttaagttctcacataggtcaaagtgcgaccaaaactcaggggtcttattgccactctcagtttttattattttgggtttttgtccttataatgtcattcataggttatggtgtccccatggtcacatatgtctttgagttttttttaatgccagttaaagagaaaccattcgggctgggtgtggtggctcgtgcctgtaatcccagcactttgggaggctgaggtgggtgaatcacaaggtcaggagttcaagatcaagccactgcactccagtctgggtggcagaacaagactccatctcaaaaaaaaaaaaaaaaaaaaaaagagagagagagaccatttgacattctagagatgactacatgcaaacatttataacttttgagagaatacactgcaaaagggagacactattttgactatcacaacaccacacccagctaattttgtatttttagtaaagatggggtttctccatggtggtttgactggcgagagcacacctgaacaaaggagggaagcaatttttatcagaaaaataataccacaacttttaagtatgctttttggccagggttcccatgaataaccaactgaaattaaatagatcaaatagttaactagacaaatggcctactcatttcaaccaggcagactgttcattaatccccaacaaccgaatctctgtaatactcaatgtatttctccacatgcaactacaagtattagcaactgcacagatacttctctttttatccagtaagtaatctagagaaattctattatttagaacaaacttaggcggaaaatttaaagtctataaatgttataagtaaaatgtttatttagaaacagaatgcttgttccttggtaccgcaaggaaaaattaacattcagacaaaaaattgtctcagcaaggcaattttactttctgcagaaagggtgctccccagatggaacaatggcaagagcacacctgaacaaaggagggaaacaacttttatcccttatgcagcttgtccctgctactgcatcctgtctccattagatggagctggaccacacaatctaagctaacccaactggctaataatttaaaactttcctaaataggtaaaggcaagggagaacaaaggaaaggaggaagttgtttatgccagatagggaaggggcataggctgtgagctggaacgtgcctgtgaacatgtccagcacaaatatcttggttaaggtacaaggacatagaatgtactatgtgcctgtgagcatgtctagcagctacataggatagggcttaacaaagagttattagcacaaagcaaggaggcttgaaggaagttagtctttaaaagaaactattacttttaatacttacaaattattctttaacaagaagggaaactttgaagaggaaactttttactttctacaatagagtatccgtaattcttagactagaatctgctatagagccctattatgggggataaatttctaaccattgtctcatttactctaaaccacggaaaagaataacctaccaagtgtgctcattcagaagaacaatggcctcctggcaatgctctttatcctattctgaataagttctctttaacttgtaaagtaagttaagagcaatgaaccaatattctgtttctgatgttatgaagcaacaaatgtcccattaaaatgtctcacccacattggccctttatctttaatctatcaaggcataagtttgttcatagataaggttgactgcaaaatcctctacatataaaaataaaacccatgagtgcacacaagagatcccttttttctttttctttttctttttttttttttctttttgagacatagtttcactcttgttgcccaggctgaagtgcaatggcacgatctcagctcactgcaacctctgcctcctgggttcaagtaattctcctgcctcagcctcctgagtagctgggattacaggcacatgcccccacacccagctgattttgtatttttaatagagatggggtttctccatgttggtcaggctggtcttcaacttctgacctaaggtgatccacatgcctcagcctcccaaaatgctgggattacaggcatgagccactgtgccagccttttatttcttttgtttgcagaggcaaaaaaaccaaaaacaaaacaaaaaaaaaaaccaaaaacaaaaaaaaaaaaaacagacaaacaacaaacagtgaactaagagtgtcatgatagcagaaatgtcttgatttttgatttcgtgaaaatagcaatctacatcaaggatgacatctccttttgaggagaaacattcctagttagctttaccttaagatctccaatgggtataaaattgtaagagtttggaggtctgcttcagagttgtgagattatgaacccaaggttcaaggtcctgaagtcttactgcagtgtagatggcaagcagatttaatctctgggttgtagattataaagacttactgtcctcagtcagtagactgttaaaaggctttctttacctggtgaaaatatgcttcatcataatacattaaaatcttgctgcatttagtcatactagacttcagtaacagaagatacaagaggatctatttttaggtgcataggccttcacctatagtccagtgactatgagggtcaacacttttttttcactctaagtgtatatgattgtcatcaatctgcaattatgaaagcaatccagtcaatgtagttagcttttctcatactattgtatccattataccttatttaacattttgaaaacttgcctagtgaaataagtatctttatcattagagactttttcagaaatgtcccatgagagaaacatttccttatatccttttagctactggtataacagcagatttctaacatcagaaagcttttctactttaagaaaacatgtgttataagggacaattcaataaaatttctgtgtaaatgtttaaatggcccatgggatagcagaaaacatgcagttttgattgttttctcatgtttatatgtttgacaaaagaaaaatgtcataacctattttaataatttagaatagtcaccccccaacacacacaaacacacacacttattttttatttatgtttgtctgtttatttatttattttgagacggagtgttgctcattgcccaggctgaagtgcagtggcatgatctcagctcactgcaacctccaccacccaggttcaagcgattctcctgcctcagtctcctgagtagctgggttacaggctcccgcaaccacatccagctaattttttgtaatttcagtagagatggggtttcatcatgttggccatgctggtctcgaactcctgacctcaggtggtccacctacctttgccaagaccagctcggctggggagaccctaacccagtggcgctagaggaattaaagacacacacacagaaatatagaggtgtgaagtgggaaatcaggggtctcacagccttcagggctgagagacccaaagagagatttacccacatatttaataacagcaaaccagtcattagcattgtttctatagatattaaattaactaaaagtatcccttatgggaaatgaaggaatgggccaaattaaaggaacaggttgggctagttaactgcagcaggaacatgtccttaaggcacagattgctcatgctatcgtttgtggcttaagaatgcctttaagcagttttccaccctgggcaggccaggtgttccttgccctcattctcataaacccacaaccttccagcatgggctttagggccattatgaacatgttatagtgctgcagagattttgtttatggccagttttggggccagtatatggccagattttgggaggcctgctcccaacatgtcccccttctctgatttgcaaatcgataaaagcaaaggcagctttgtcacagtgagctacttcccgcaggagtcaggatccacatctgcagactatacaaagacaaacaacacagatgaaaagcacaatcatcattgaagtcacagagttttcaagtgtttttatccattttcagctcctttaagtactccagttcctggcattaaggccaggtgtgcctgggatgctttaaatatttgttcttttaattttaaatccttatgttaagctccttgagtgggccatatcatttgaatttgaggtgccactatactgccatggttccagataataggaactcttgctgtacttcttattatatctaccatctgaccattttgttcagaccagctgaacatagtgtgggcctggcatgcagactgagaggtggaattcaagctaaacatccccttaggggaccaattaataatgattccataggaatcattgtgcagcacctctgcctgctctgcaatgcaatcttcctaaactagtaggttcattttttctaactgggtccaatcctgtttacaaataggtttttgagggtggtatgcctcaattataggagcagatttattatggtaaatactgagatcagaaagcatgtgtaactgtgtcataaagtgattgcatccaggcattattgccagccaagactgataaatataaccaataagtataattgttctctgtgtcagcccttattgaaggaatactcacagcagtggtgataaccactatcatagctaccattaaattattcgttgtgactggttgtctcgcttttctcaggtttttttctgccatttatgacagcttcttgatttgtccccaggtgggtggctgtgttcaatgggtgttgctcatgacagttggggtcctcctcagcatcactctcaacatggctgcaaccggggggtcctcaggatcctcccagagtcttttccttggcatctggctcatgataaggtttcagatgtcttgatggtatccaaattggctgttgattcagtcctggagaaacacaagcataacctctactccaagttattattttacctatttcccaactttttgttattggatctctccaccaaatcagttgttctgcttctgtctttgcaactggtttctgtagatgctgttcagctgctgataacatctggcctttgggtaggctcaaaaaatttaaagttaataatgctagattcaattgcatctgtggggtttcatattctctgtctccctctttctgcttttgcaactgctgttttagggagagattcattctttccactatggcttgtccctgagaattgtatgggataccagtaatgtgtttaatattccacatagagaaaaatgtaggtagagcttggctagtatagtctggggcattatctgttttaatagaagctggaatgcccatcaccgcaaaacactgcaaaagatgatgtttaacacaggcagaagactctcctgtttggcatgtagcccagacaaagtgagaaaagatgtccacacatacatgtacataagctagtctcccaaacaagggaacatgtgtgacatccatttgccaaagagctataggttccaatcctcaaggattaactcctcctgtaaaagaagaggaatgtaccatttggcaagttgggcatcactggataatagttttagcttctttccaggtaatgctgtatctgcgtttgagaccagaggcattagcatgggttaaattgtgaaaatgtctagcattagatattgcattagcaactaggcaatcagctatctgattccctttagtcaaaggtcctggaagaggtgtatgagcgagccctaatgtgagtgatgtaaaaaggatgcagtctattcctaactgctgtttgcaattgggtaaataaaatcatcaggtgttaatctgtatgaaatcataactgagcattttcaattaactgtgtggaatgaaccacgtatgaagaatcagaaatcacattaataggcatatcaaaagcagtcaatacctcaattacagctacaagctctgcttttgagctgaagtatagggcatctggaaaactttacttttcgagccagaataaggagctttacaattactagacctatctgtaaaaacattctcagcaccttcaatttgtttaaatttagttatttcagggagaatccaattagttaatttcaaaaactgaaacagctccattttaggaaaatgattattgagaatacccacgaagtcagctaaatgagtttgccaagtaagactatttataaaagcttgctgtatttgtgcattcatgagagagacaataacttttccaggatcatatccatgtaatttaacaatccgagttctcccaattcctatcatagttgcaatttgatctaaataaggagttagagtccatgaattagtatgtggaagaaaaagccactctactaagtcctgtttttggataataacaccagtaggtgaatgctgagttgaaaaaattagcaaatctagagtcttctctggatctattctatttacttgagctttatggacttgcattttaattagttgtaacccttccttagcctgctttgttaattgccaagggctagtaagactaggatttcctctaaggatagaaaacagattacttgtggcataggtaggaatgcctagagcaagtcgtatccaattaatgtcccctagaaatttttgaaagtcatttaatgtttttagttgatccctatgtatggttaccttctatggcacaatggtagtgtcatttactaaggtccccaagtaggagtaaggagtagtagtctgaattttgtcaggggctataattaaaccagcatgaggagtcaaattttgcaagtgaccataatattggaataatatttctcaagtgggggcagcacaaactacattatccatatagtgaataatgtaacactgtgaaaaatattttatgagtaggttcaattgcttaccccacatacgtctggcaaattgtaggactgtttaacatgccctgtggcaacgctttccaatgataacacttagcaggctgcaggttgtttattgcaggaattgtaaaagcaaaccattcacagtcttgctcagctaaaggcatagtaaagaaacagtcttttaaatctaggactactaaaggccaagtttttggaattatagcaggagaaggcaatcctggctgtaatgctcccataggttgtataactgaattgatggttcttaagtcagttaacgttcttcatttacctgatttttttcctaattacaaaaactggagaattccaaggagaaaatgttggagctatgggcccattttctaattgttcagtaactaatttctctaaagcctccagtttctctttatttagcagccattgttctatccaaattggcttatctgttaaccattttaaaggtataggttctggaggcttaacaatggccaccatcaaaaatgatatcctaatctttggcagaaattttgtcttccacttgaagccgttctttcaaaccttgcaaaattttttccagtcccatgccagggacataccccatttcatgcattgtatgttgactttgagggctatataatttttctggaattagaatgtgtgctccccgttgttgtaataaatctcttccccataaaattataggtatagaagtaataattggttgaatagtcccaggttgtccatcgggcccttcacaatgcaaaatataactactttgatatacttcaggggctttaccaactccaactatgttaaattgagtgggttgaattggccacaaggatggccagtgctgtagagaaatgattgaaacatctgcttctgtatctatcaaacctttaaatttctttccctgaatagttatttcacaggtaggacatttatcagtaatttgatttacccaatacgctgctttgccttgtttatttgtgcttccaaatcctctttttcatttagtttcactttttcccattcccacatatggcacaatcaggagctgtgctatacactctcctggctctgctttccagggaacagaagtagatacaacaatttgaatttccccattgtaatctgaatcaatgactcctgtatgtatttgtatgccttttaaacttaaactagaccttcctaaaagtaatcctattgtccccactggcaaggttccacagactgctgttgggaccttttgcgggggttgcccaggcagaaggctcacaggtttcatgcagcataaatctactgtggcagtactggctatggcaggggacagacattgtacgggggtgacggaatggcctgagctggaaatacccccttttagaacggggcctgggaagggcccctcatggcgtttcctgaaattgggttcccttctttatcaaacttagagtgacattgattagcccaatgttttccttttttacatttttgacatatttcaggatcagcaattttcttttttcccctatctggcggcctgacttctacattcctttttagtatgaccatgcttcccacagttaaaacaagctccagaaaatggatttatttcctttatccactctcagtcctgccattgcctgttctaccagagtagctttatgcagattacctctaataccatcactggccttgatataatcaactaaatgtgctttccctctgataggtcacagagcagcctggtaatcgggattagcattgtcaaaagctaataagtgcaacactatatcctgagtagccaaatctgcaatcatctttttaagagactcctgtaaccgagctataaaatcaatgtatggttttcttggtccctgttttatagcactaaaggaagggtatttttccccacttgaagtgatttttttcccaagctttaatgcacactcctctaagctgttctatggcatcatcctgcatgaccagttgtgcatctaaaccagcccagccgccaacccccaaaagttggtctgagttatatcaatttgaggatgggcctggccattgttagcagcctgaatggaagcttcatctgcccaccaagttttcaattgtaagaactgagcaggagttagacaaactcaagtaagagtgtcccagtcagtaggaatcatctgactggaaacagcaacattctttacagttgttacattacaaaacagtcccattacaaaaggagaacctggtccatactgattaatagcttctttaaattatttgagtaatttaaaaggaaaaggctcaaatgtagccgtaatatttccctgttgatctggggggtgtattctaacagggaactgccaagcctctaaatcaacctctcgtctagcttgctgaattcctgcctgaatagaactaagagtggtcactcgaggcgctgtttgaacagtcactggggcaactacttttcatccagtgtcctctggaaaagaaagatctggagggtctttttcttcaaaataataaggagggtgtgcagaagggtagggatgaacctctccttcctttgccgctttctctttagctggtaaataaacatgctctgtaacctcttctgttactttgctgtactctcgttcctcctcattagtgtgaaaaagttccaaagtgaaacgaaccagaccccacacctgtcctatttttaccctgatgcttctgagctccccctcttactcaccacggggattgctttaagagtactcaggtgtcctccagttagttctccattccaaagattgctccagtgaccctttgacctggattcgagccccaatgatggatgccacttgccgagaccagctgggtgggggagaccctaagccagtggtgctagaggaattaaagacacatgcacagaaatacagaggtatgaagtgggaaatcaggggtctcacagcctgctgagagccccaaacagagatttaccacatatttattaacagcaaaccagtcattagcattgtttctatagatattaaattaactaaaaatatcccttatggaaaatgaagggatgggccaaattaaaggaacaggttgggctagttaactgcagcaggagcatatccttaaggcatagatcactcatgctattgtttgtggcttaagaatgcctttaagcagttttccaccctgggtgggccaggtgttccttgccctcattccggcaaacccacaaccttccagtgtgggcgttagggccattatgaacatgttattttgctgcagagattttggttatggccagttttggggccagcatatggccagattttggggggcctgctcccaacatgccttggcctcccaaagtgctgggattacaggcatgagccactgcacccggccctatatttatttatttatgttttctttttgagatggagtttcactcttgtcacccaggctggagtgcaatggtgtgatctcggctcactgcaacttccgcctcccaggttcaagtgattctcctccttcagcatcctgagtagctgggattataggtgcccaccaccatgcctgactaacttttgtatttttagtagacatgtggtttcaccatgtttgccaggctggtctcaaactcctaacctcaggtgatctgcccaccttggccttgcaaagtgctgggattacaggcgtgagccaccatgcccagcctaatttatatttaatttagattattttatctcatctgtgatatgtaatggaatacagcactttcaataacggaagctataagaactcaggaataaacaaggggctgttggctttctaggttttccatgagtccacacttaacataaaatttatttcctcttaaatactaggctttgtttctccaatttagttgcattgcactgataactgtcataggtaattgacttaaaccacagggtttattcaaatgacatatctgaaaaattcagtactagctgatttaccataaatatgagacagagtattttcaaaatatttaattaatatttattttgcctgggttataaattttatgagtcagtctcttcattagaactcacataatccttacccagtccaaacaatatgatcctcaaattatcagaaacctgtactcaatttttctgggccatttttatcttttcataaaccttcttaaagacacaatactctagaattttgcatgcttttgaagtttttagaaactatatcagaattaacctgttaactgtagaaatgacttgaaatggttataaaggaacaaatgaaaagaagttcattatatctgtggcctacaataatttatcataatagccataattatgactaatagcatatactcaggtatattagatttttagaaattgtaggccaggtgtggtggctcatgcctctaatcccagcactttgggaggtcaaggttggtggatcatgaggtcaggagatcaagaccatcctggccaacatggtgaaaccacatctctaccaaaaatacaaaaaaaaaataggtaggcatggtagcatgcacctgtagtcctagctacttgggaggctgaggcaggggaatcgcctgaacccaggatacagaggttacagtgagccaagattgcaccatttcactccagcctgggtgacagagcaagacaaaaaaagaaagaaagaaagagagaaagggggtagggagggagggagggaggatgtatacaattttggaatacatttttttgtttgtttgtttgttttgttttgtttttagagacagagtttggttctgtcacccagtctagagtgcagtggcgtaatctcggctcactgaaagctccacctcccaggttcacgccattctcctgcctcagcctcccaagtagctgggactacaggtgcctgccaccgcacccagctaatattttgtatttttagtagagatggggtttcaccatgttagccaggatgttctcaatctcctgacctcgtgatccacctgccttggcctcccaaagtgctgggattacagatgtgagccaccgcgcctggccttttggtttttatttttgagacggagttttgctctgtcaccaggctggagtgcagtggctcactgcaacctccacctcctgggttccaatgattcttctgcctcagcctcccgagtagcagggactgcaggcatgcatcaacatactcagctaattttttgtattttagtagagacagggtttcaccatattggccagaatggtctctatctcctgacctcatgatccacctgcctcagcctcccaaagtactgggattacaggcttgagccaccacacccagcctttggactaaatattaataacatttattaaaataaaagtttgatcaaacatttttaatttaacaatgttttccatttaatttaccatatcagataattctgttcttcactctttgggatgctgcgttggccctctgtaacatccaaaactttgggattaaaaaaaagacaattttttagctgaaatgtgattttgtgaagcttgtcaaatatgtcaaagggttgccaggcatggtgactcatgcctgtaatcccagcagtttgggaggctgaggtgggtggatcatgatgtcaggagttcaagaccagcctggccaagatggtgaaaccccatctctactaaaaatacaaaacttagccaggcgtggtgacaggcacctgtaatcccagctactcaggaggctgaggcaggggaattgcttgaatccaggaggcataggttgcagcgacctgagatcatgccactgcactccagcctgggtgacagagcgagactcagtctcaaaaaaaaaaaaaaaaaaaagtcaaagggttaaaatgctttaccaaaataggatcacatggcaccataaaataatagtcattcacttaaaaatgtgataataaaaggattttaaaaaacaaaaccattaccacttgatataagagattgagttttccaattaaaacacctgagaaagacagcatgaaaaaattctatctctactttctttgttttcaaatttgttcaaaaagtgaacaaaaatattttactttgtcatattattaatacataagacttttgttccagagaaaatcaatttctagttttgtattagtgtattatctatactaaagctcattttaataaaactttataaataaatccaccaaatttgtcacttttgaccactctagatttccatacatgttttacaatcttttatagttaattctttaactttttatattctgtctctattctttttattttttcatttttcaacaatctctaatttcaaacttatcgggggaaccagcccccaatatttccatgtatgttcttttctattttccttaagtgtcagccagtctgagaaataaacagaaagagtacaaggagagaaattttacagctgagcctctgggggtgtcatgacatattggtaggactgtgatggcgacctcgagctgcaaaaccagcaagtttttattagggattttaaaaggggagagggtgtacaaacagggagtaggtcataaggatcacatacttcaaagggcaataaagatcacaaggcaaggcaaattagaattcctgatgaaggtctatgccccaccgtgcacacattgtcttgataaacatcttaacaggaaacagggttcaagagcagagaaccggtctaactagaatttagcaggctggaatttcccaatcctagtaagcctgagggtactgcaggagaacggggcatatttccgtccttatctcaaccacataagacagacactcccagactggccttctatagacctacccccaggaaggcattccttccccagggttatcaattattaatattccttgctgggaaaataattcagtgatacttctcctattcacacatctgtctataggctctctgcaagaagaaaaatatgactgtattctgcccaaccccacaggcagtcagaccttatgtttatcttcccttgttccctgaaaattgctgttattctgttctttttcagggtgcactgatttcatattgttcaaacacacatattttacaatcaatttgtacaatagtggtcctgaggtgacgtacattctcagcttatgaagataacaggattaagagattaaagtaaagacaggcataagaaattataagagcattattagggaagtgataaatgtccatgaaatcttcagaatttatgttcagagattgcagtaaagacaggcataagaaattataaaaatattaattttgggaactgacaaatgtccatgaaatcttaacaatttatgttcttctgcctcagttccagctggtccctctgttcagggtctctgacttcccacaacacaaactagaggaaactttcccaatttttttatcaaaaagtagtttttacttgtctatacattctatgcagagttgtttttcttacatctagtagttttaattacatacgttaattacattaactctgaacaaccaaatttttagtgaaatctcaaggaagtaattttgaacagtttcatatcagtatttgtgacaaaaacaattttatattttttaaaaaagacgattttctcaaattttctgttaactaacagatctaaatctatttagttttttaaacatcatataaaaataagattccagtaaatcatggtgtctcacacttgtaatcccagcactgtgggaggtcaagacatgaagactgtttaagcccagaagtttgagaccaacctgggcaacatagtgaaacccacgtctacaaaagatacaaaaattagttgggcatagagccctccacctggagtacaagctattcaggaggctaaggtaggaggattgcctgagcctaggagtttgaggctacagtgaaccatgatggagccactacactccctccaaagtcacagagtgagacactttcttaaacaaaaaaatgctaatgtatataaacttaaacttatgggtttctttgctcttattattttaatagttattggggtacaggtggtgtttgctggtgatttctgaaattttggtgcactcatcacctgagcagtgtacattgtattcaatgtgtagtcttttattcctcaccctctcccatccttctcctcaagtctctagagtccattatataattcatatgtctttacagcctcatagcttagctctcacttataagtgagaacatacaatgtttggttttctattcctgagttacttcacttggaataatggtttccaactccatccatgttgctgcaaatgccattatgttgtttctttctatggctgagtagtattatgtataccacattttcattgtttactcattggttgatgggcatttaggctggttccatatctttgcaattgccaattgtgctgctataaatatgtgtgttataagtttcattttgttgttgttgtttttttttgagatacagttttgctcttgttgctcaggctggagtgcaatggcgcgatcttggtttactgcaacctccgcctcaccagctcaagcaattctcctgcctcagcctcccgagtacctaggattacaggcatgtgccaccatgcctggctaattttttatttttaatagagatagggtttctccatgttggtcaggctggtctctaactcccaacctcaggagacccacccaccttggcctcccaaagtgctgtggttacaggcgtgagccaccgtgccaggcccacaagtttcatttttatgtgacttctttttctgtgtatagatactcagtagtgggactgctgaataaaatattagttctatgtttagttcttttaagaatctccatactgtttttttatagtggttgcactggtttacattcacatcaaaagtgtaaaagtggttttttttttaaccacatccatgccaatgtctatttttttgttttgttttaattatggccattcttggcagggcacaatggctcatgcttgtaatcccagcactttgggaggctgaggtaggtggatcaattgaggtcaggagttcaagaccagcctggccaacatggtgaaactccatctctaaaaatatatgaaaattagccaggtgtggtggtaggtgcctgtaatcccagctattcgggaggctgaggcatgagaattgcttgaacctgggaggcggagattgcagtgagccgagatcgtactgcactccagcctgagcaatagagcaagactcaagtcccaaaaaaaaaaagaaagaaagaaagaaagaaaaggctgggcacggtggctcacacctgtaatctcagcactttggaaggccgaggcaggtggatcacgaggtcaggagatcaagaccatcctggctaacacggtgaaaccctgtctctactaaaaataaaaaaacaaaaaaaattagccaggcgttgtggtgggcacctgtagtcccagctactcgggaggctgaggcaggagaatagcatgaacccgggagacagagcttgcaatgaaccgagatcgcgccactgcactccagcctgggtgacagagcgagactccatctcaaaaaataaaaaattatggccattcttttttttgacatgaggtttcactcttgttgccctggagtgcaatggcataatctggctactcttacaggagtaaggtggtattgcatcgtgcttttgatttacattacaaatcaaagtcccatttatttatcttcacttaattgtatttgcttttgggttcttggtcatgaagtctttgcctaagccaatgtctacaaaagtttttctgatgttatcttctagaattgttagttacaggtcttagatttaagtctttaattcatcttgagttgatttttctatgagagatgaagatccagttttattcttctacatgtaccttgccaattatcccagcattatttgttgaatagggcattcatttcccactttgtgcttttgtttactttgtcaaagatcagctggctgttagtatttggctttatttctgggtttgttattctgttccattgctctatgtgcctatttttataacagtaccatgatgttttggtagctacagccttgtagtacagttttaagttgggtattgtgatgcttctagatttttgtttgtttgtttgttttgcttagttttactttggctatgcgtgcttttctttggttccataagaattttataattgttttttcaagttctgtgaagaatgatgttattctgatgggaattgccttgaatgtgtagattgcttttggtaggttggtcatttttaaagtatttactctacccatccatgaaagtcagatgtttttccatttgtttgtgtcatctgtgatttctttcagtagtgttttgtagattttcttttagagacttttcacttcctcggttaggtatatttatttatttattattattattattttttttttgagatggagtttcgctctcgttgcctaggctggagtgcaatggcatgatctcggatcaccccgatctccacctcccaggttcaagcgactctcctgcctcagcctcccaagtagctgagattacaggcatgtgccaccatgcccagctaattttgtatttttaaaagagacgaggtttctccatcttggtcaggctggtcttgaactcccgacctcagtttatctgcctgcctaggcctcccaaagtgctgggattacaggcatgagccaccatgccctgccacggttaggtatatttctgattattttattttattttttgcagctgttgttaaagactttgtgttcttaatttgattctcagcttggtggctgttggtgtatagcagtgctaccaatttgtgtacattgactttgtatcctgaaacgttactgtatttatttgtcacatctaaaagcttttcgggtgagtctttagggttttctaggtatatgatcttatcatcagtgaacaataacatcttcacttcctctttaccaatttggatgtcctttatttctttgtctcatctgaatgttctggctaagacatcctgtactatgttggatagaagtggtgagagtggccatccttttcttgtttcagttctcagggggaatgctttcagcttttccttgttcagtatattgctggctgtgggtttgtcatagatgacttttattcccttaaggtatgtctcctctatgctgattttgctgagggttttaatcattaagggatgctgaattttgtcaaaagctttttctgtatctattgagatggtcatacaatttttgtttttaattcagtttatgtggtgtatcacatttattgacttatgtacattaaaccattcatccatctctggtaggagatgcattgtatcattgtgtattatctttttaatatgctattgtattttgttggctagtattttgttaagaatttttacatctatgatcatcaggaatattggtgtgtagttttcttttcttgttatgttttttcctggttttggtattagggtgatattggcttcatggaatgatttagaaataattctttcctactctatttttttgaatagtttaagtagaattggtaccaattcttgtttaaatggcaggtaaaattcagctgtgactccatttggtcccagagtattttttgttggcaattatttcaatcttgctacttgttattgatctgctcagagtttctatttcttcctggtttactccaggagaattgtatatttccagaaatgtattcacctcttctaggttttctagtttgtgcatttcataatattcatagtagccttaaataatgttctgtgtttccgtgggattgcttgtaatatatcctgttttgtttcaaattgagtttatttgaatcttctctcctttccttggttaatctcgctaatggcctatcaatttcatttatattatcaaagaatgaacttttttcatttatcttttgaaatttttgtttcaatttcatttagttctgcactgatctttgtgatttatttttctgctgggtttgggtttagtttgtttttgtttctctagattctagaggtatgagcttagatttttaaatttgggctctttcagactttttgatataggcattgttatgaacattccctttagcactgcttttgctgtattccagaagttttgataagttttgtcactgttatctttcagctcaaagagcttttatatttccgtcttgattttattgttgagcaaatgattattcaggaaaagattatttaatttccatgtatttgtatagttttgagggttcctttcatagttgatttccagttttattccactgtgatctgagcgagtacttgatataatttcaattttcctaaatttattgagacttcttttgtggcctatcacatggtctatcttggataatgtttcatgtgctgataaaaaatacacattctgcagttgttgggtagaatgttctgtaaatatgtgttaagtccatttgttctagggtatattttaagtttattgtttctttgttgactttctgtcttgattatctgtctactgctgtcagtggagtattgaagtcccctactataaatgtgttgctgtctatctcattgcatttttttctttcttttttttttttttttttttgagatggagtctcactcttgttgcccaggctggagtgcaatgacacgatctcagctcactacaacctctgcctcccaggttcaagcaattctcctgcctcggcctcctgagcagctcggatttcaggcacccgccacaacccccagctaattttttttttttttttttttttgtacttgagatggagtcttgctcttgttgcccaggctggagtgccatggcacgatcttggcccactgtaacctccgcctcctgggttcaagtgattctcctgcctcagtctcctgagtagctgggattacaggcacccaccaccacgcctggctaattttttgtattttagtagagacggggtttcaccatgttggccaggctggtcttgaactcctgacctcaagtgatccacctgcctcggcctcccaaagtgttgggattataggcgtgagccaccacacccagccaactaattttagtatttttactagagacggggtttcaccatgttggccaggctggtctccaactcctgacatcagatcatccacccgcctcggcatcccaaagtgctgggattacagtcgtgagccacctctcccggcttaaagttttttttctttaaaagttttcaaacatttgctatgatgaaaaataaataatgtgctgttcagctttgatttttttttttttttttttttgagagagagtctcgctctgttgccaggctggagttcagtggcacgatctcggctcactgcaacctctgcctcctgggttcaagcgattctcctgcctcagcctcctaagtagctgggactacaggcgcccgccaccacgcccagctaatttttgtatttttagtagagatgggtttcaccaggttggccaggatgatctcaatctcttgacctcgtgatccgcccacctcggcctcccaaagtgctgcgattacaggcatgagccaccacgcccggcctcagctttgatcttctaaactcatccttcatcttttccaaaaattattccatgtcttttcaaaatgcttctccagttttgtttttttttttcttgaaacagggtctcactctatcacccagttttgcttgcaatggtgtaaccaatcatggctcactgcagcctggaccttccaggctcaagcaatcctcctgcctctgccacctaactagctgcagctacaggcatgcaccaccatggctggctaatttcttcatttttgtcatgaaaacaaactcttattatgttactcaggttgcactggaactcctgcgctcacataattctcccatctcagcctcccaaagtgctaaaaatataggtgtgagccactgtgttcttctgcaaatttttttttttttttaatacagaggctggctctgttgcccaggctggagtgcagtggcacgatctcagctcactgcaacctctgcctccccagttcaagtaattctcctgtctcagcctcctgagtagctgggattgcaggtgcacaccaccacgtctggctaatgtttgtatttttagtagagacagggtttcaccatgttggtcaggctgctctggaactcctgaccccatgatccacccaccttggcctcccaaagtgcaaggattacaggcatgagccactgcacgtggcctcttctgcaatttcttaagaggattatttccagtgataaacagtagtatatgaacacaaacctaaaaggaatctgacttattctgtagaagtgtcactctccaggatttcaagggtctagggcagggcagctactttagtagtatgatctatggaggtgcatgggctttggcgtcagataaagttgatcctgagtcttattccagtcacttagtactcgtgggtctttggacatgtttgttgatgtggagaagctctatataccacatatgcaaaaaaggtagactgatactgattgcaaaatggcagcaatttttctgccctcttgtatctatgcccattgtcaggtgcttttacagctgtttccatcaagatccagaatctgtcttctaaaccctagatctggctggccttatttgctcagggcagtagaaacttgtgaacatgacagtgggctagtttggggcccaggctcaaatggtcttgaatacttctgttttttgttcagaatgctgcaatctccatgaataaagcccatgttagcaagcttaaaaataagataccatgaggaggagaagcaaggtgcccctgttgagccccagaagcagaagatcacccccagaagtacagctggctagtcaacaagcagctgatgataccagtctgaaagagctcagctgataccagaagaacggccccactcacccagcctaaatggctgatcatcttaattataaactagtaagttttggatgatttgttatgctgcaatagctaactaatacatgcaccagtgcagataggatgccaggattcagtgacaggttgattacttgttgccttctaacagtgggcaccctctaggtactgatttcttcccctaatttaaagttggatgtcttgaaagagaatgttgggtaatgcagaaatactgggagacatgtatgcatgtgattggtgtttatattcgcacagtccccacaccacaggagaaaacagataaccacagcctcgcaattagggtcaaggccaaatagcaaaataagtttgcctttaatctattttctctgtatctaaacactggagtccaagaatgtgggcagaactgaagacacagagtttttttctcctaagctccatcatcctatgttcacagcctaatctctaaaagaaaggtgggcaacaggtggtaagcagtggtttacctgtggttattttatttctgctgccctcagctctttctatggccactatctgttccaacctcagaactgaagatagatgttagtagggagaggcccttccttcccctctggcccttcacaccattgacatcagagctgccatgtgtggctcctgggtgcctggaatgtgcttggtctgaaccgcgatatgctagaaaggtaaaacacagagttattttcaaaaatttagttgcaaatatttatatacttcattaataattacatattcctcacacattaaaatgatattttgtatatattaggttaattacattgttacaatcaattcaacctgttccttgttattgttgttgttgttgttgctgttgttgcagtctgtcactaggctggagtgcagtggcgcaatctcggctcactgcaacctctgcctcccgggttcaagcgattctcctgcctcagcctccccagtagctgggattacaggcatgcgccaccacgcctggctaatttttatatttttttcagtagagacagggtttagccatattgccaggagggtctcaatcacttgatctcgtgatccaccagcctcggcctcccaaagtgctgggattacaggcgtgagccactgcgcgtggcctcttgtttctttatatttttcaccccccaaaacggagtctcgctctgtccgcccaggctggagtgcagtggcgcgatctctgctcactgcaacctcctccgcctcccgggttcaagcaattctcctgcctcagcctcctgcgtagctgggattacagatgtccaccaccacgcccggctaatttttgtatttttagtagagacgtggtttcaccatgttagccaggctggtctcaaactcctgacctcttgatctgcccgccttgtactcctaaagtcctaggattacaggcgtgagccaccatgcctggccccttgtttctttttaattttctagtttggctaccagaaaattcaaaattcacgtggctcacattttatttcagaggattacctcctttttaaaatctcaggctgcctgctcaaaggaccgtaagccaggaaagtaaaaaaaccctgaaattttaaaacatttgttattatatccttttcatttatgtatagccatatgatatagtatttacaaatgcatatgaccttatacgcaaggttgaatgcaaataccctttggggtgggcctatctcagctcaaggaggaagccctgcctgaaaaggctgcagcctaggcggtcactctttcttcattcagcccagcatctaattacatcttctgtcagtcagggcctgagagggtggggttttaaacgttatccaatcagcgacgctgggctgggaactgtccaatcaggcacgcagcttgagcggagaggacggcttccgggatgtggcgggatttgtccgcttctttgtctttggctgccgctggaactccgggtctcgtcttcactgctctgtgtcctctgctcctagaggcccagcctctggtcctgtgacctgcaggtattgggaatccacagctaagacgccgggacaccctggaagcctagaaatggtgagagtgcggggtccaacatcccgagagaggggaagggctggttggaaccggtgggaagtggctgtggcgagactcaggcctccccgcagtcagctctacaatctgcgccccgagttctccttgcccagctcggcctcagtcgccttcagccataagatggcggttgcgccgacagcccggcccccgggcgtcctgtctcttccctgcatagtgactgtgcccttgcctggagccctctctggggaatctctgcacccgcagcgccgcttctctaccggattgtgcagggaccgtgggagggtcgtcaggggagaatcctgacttggggtgcgggttcatgaatgggaagaggtttgttccgtggggttcccagttcctattatctcctattaaaagttaatgggagtcactgcaaaaatattaaaagaatttaatcaaagagtggttctaggctgggcgcggtggctcacgcctgtaatcccagcactttggaaggccgaggtgggcggatcagaggtcaggagatcaagaccatcctggctaacacggtgaaaccccgtctctactaaaaatacaaaaaatgagccgggcgtggtggcgggcgcctgtagtcccagctactcaggaggctgaggcaggagaatggcgtgaacccaggaggcagagcttgcagtgagccgagatcgtgccactgcactccagcctgggcgacagagcgagactcttgtctcaaaaaaaaaattaacttattaaataatttaatcaaaaagtggttctagaattgtagagcaccaagctgtggtttttagtttgtggtctatgggagaggcttgaaagaaagtcttttgtaaaatgcatgatgaagaaaaccaaatttagtaattggttaggtacagttacgtggttttttaatttgtacattaaaggtgaaaatttcctggttatgtaatcggagctcaattggcagtttatagtaggtgaagcctcaattttgtttctctgaatttagtaattaaaaataatgcgcctgagttagattttttaaattgaagtaggaacccagggactagagaaacctcagtctaattgcctgccacttaattattttcacactccacagggaactgattttctgctgcatttttcacctgggtcccaatcagggtcttaagtctaacccccatccctcattactccaacctcattcttgcttgcagtaagatactaaatttccaatttcttctggggttcccaaatgccagcttttcctccctaattcacattatcacgtatttgtgtttttttgtttgttttgttttgtttttgagatggagtctcgctctgtctcccaggctggagtgcaatggcgcgatctcggctcacctcaacctccgcctcccggttttaaacaattctcccacttcagcctccttagtagctgggattacaggtgcgcgccatcatacctggctaatttttgtgtttttgtaaagacgggggtttcaccatgctggccaggctggtctcgaactcctgacctcaggtgatccgcccgcatcagcttgccaaagtgctggaattacaggcgtgagccaccgggcctggccacttattttgtagtgtacttttttataccgtattttaattaattattttttggcaaggcattaaatggtgcttttttcttttcttttttttttgagacggagtttcactcttgttgcaaaggcacattctcggctcaccacaacctccgcctccgggttcacgaggttctcatgcctcagcctcccaagtagctgggtttacaggcatgcaccaccacgcccagctgattttgtatttttagaagagatagggtttctccatgttggtcaggctggtcatgaactcccgacctcaggtgatccgcccgccttggcctcccgaagtgctgggattacaggcgtgagccactgcgccctgcataaatggtgttttgggggtttttttgtttgttttttgttttgagacggagttttgctcttgttgcccaggctggagtacagtggcatggtctcggctcaccgcaacttctgcctcccgggttcaggcgattctcctgcctcagcctccgagtagctgggattacaggcatgtgccagccaccacgcccggctaattttttatttttagtagagacagggtttctctatgttggtcaggctggtctcgaactcccgacctcaggtgatccgcccgcctcggcctcccaaagtgtggggattacaggcgtgagccaccacacccagaccaatggtacttttaagaaggtttgttatctgtttgtaaatattttccatgaaaagaaagcaaataataatcccctgacactgtgttgcaaaaaatctctgtgtgtcttttccttttatctttctaggcacagagatgttatcggaatttttttgggtcagagttctgctttggaaaatttatggggtgatgtgtcctcagccaccgtttagttttttcccggtcctgggtttcagtattatctggggataaaccgagatatctgccatggttatgtcagctagagtgtctagtggatatcagcttctggtttattttctcccataggacgacctgaggtatggagtgtatcctgtcaagggggcaagtggataccctggggctgagaggaatcttctggagtactcttattttgaaaaggtaaccccttgatatgttaaaattgtctttgggaccagcttgaaaaacatgctctactaaaaatacaaaaaacttagccaagcatggtggtgcatgcctgaatttccagctactcggggttgctgaggcaggacaatcacttgatcccgggaggcagaggttgtggtgagccgagatcctgccattgcactctagcctgggcaacaagagtgaaactccatctaataataataataatgataataataataataataataataataataataatgaataaattgtcttctaccaaccctgcttccatttcatggagacaaattgcttgtcagccaatcagatgctggtaatgaggaacaaacacagtaataacttctgccccctggattctgtaagggagcagaagaatagtgaaataaatatagtaaaagaaaaagagtaaaaaacagtgaaaaatatgtgaccaaaaaaatagtatcccgaaagacaaacaacaaaaacaacaacaaactgactccagtgagatggtgtaagaacttgcaaagtaaaatgcacctagggcagtcaccgaaaaatagtgcagtgtctcctgaatgggtggttcttgagcacataagtgagcaggagtgggtggaaggatctctcaagtgattgaatggcctgacttgaaacgtgagtcagacacatctgttatttaaccagcactgccattcctggatttgtcaccttgaagagatttgttcacttattttcacctgttttttagctgtaaggttacattatattagtagggcttgaaaggtagaaaaatatttacaaagggcataaaagacgtgggattcaaaaaaattaatcatatatttcatttgttaaaaattttcacttacctttttctttcccagagtgagtttacaagttttctcaggtgtagcttttaatggctgggtgatttcaaacagaatttcaagcttagctttcagaatgctaccaagaaaaagaagaggaaaaatgtctattccatttttgccgtagaaaatgaatacgtttccacaagaaaatgtggtagataattggtgagttacatagattcatgaaaacatcagttcctttttttggcagggtaaatttttgacagcgaatatctctgttcaaattctgttatcttgatttctgagttttatgctaaattttatgagatgaaacttggtattgcctggaagtgtttccatatgactaaatgtttgctgcatgatttttaatggaattaatagaataatacatttattttctgatagaaatacttttgcttttcttattaaggtataaaatgtaagcaccttaaaattttcttcccttataggaatactgtgtttgagtaatttttttggatttttcaaacaacttagtttcaaaaaccaagtgagcaactctaacatggaaattaaagcttgagcccagtgactcagagctagggcttatattgagactgtaaaagtaggttattaaaggtccagttagttttttctggagtgcctctcctgcagatgttctagcctgctcactccagtcatggaagaagcctttctgatgagagaagctagagtcctggaaagctacaggcagatgagttaaggttaagacaaaaggggactgggagggtcttactgaccgtgtagttgttttaaggcagtttctagactttgtaatatgttataaagttaatttctgttaaaaaatttgaattctagacccaggcacggtggttcatgcctgtaatccctgcactttgggaggccaaggtgggcggatcacctgaggtcaggagtttgagaccagcctgaccaatatagtgaaaccccatctctactaaaaatacaaaaattaactgggcgtggtgatgggtgcctataatccagctattctggaggctgagacaggagaaatggttgaacccaggagtcggaggttgcagtgagccgataacggtcccactgcactccagactgggtgacagtgagactccatttaaaaaaaaaaaaaaaaaattgaattctagagcccggcatggtggctcatgtctgtaatcccagcactttgtgaggctgaggcgggcataccacctgatgtcaggagttcgagaccagcctgaccaatatggtgaaaccccgtctctactaaaaatacaaaaataatccaggcgtagagatgtgcacctgtagccccagtgacttaggagcctgagacaggagaaatgtttgaacccgggagatggaggttgcagtgagccgagatcatgccactgcactctagtctgggcaatagagcgagaatccgtctcaaaaaaaaaaaaagaattcaaaaagagcattgcaacaggaggaataccaattataaaaattttaaggaatgcaattttaggtagacaagggctttttttcatagagtggagcctacaagattagaaagaatggaggagaatggcaaacggggggttaaaaaatcagatttcagatcagagaatgttttatcctgaagtcagcatgttcttaggagggatatagaatgaaattgtataatggctcagattgagggtagctcaaagttcagtagcctgtgaaaaattttatttagaccactgaagacaaatacagctgactcttttaataagaaaaagaagaaaaggtgccaagtttttaccaaaaaagggtcccaatccaaaccccaagagagggtccttggatttcattctagaaaagaattctgggtaagttcattgaataaaatgaaaggaagtttattaagaaagtaaagaaataagagaattgcttactccataggcagagcagtccggaggcctactggttgcccattttatggttctttcttttttttttttttttttttttgagagggagtcttgctctgttgtgaggctggagtgcagtggcatgatctcgactcatggcaacttctgccttctgggttcaagtgattctcctgcctcagcctcctgagtgactgggactacaggcatccaccaccatacccagctaatttttttttttttttttttttttttttagtagagacagggtttcaccgtgatggccaggatggtctccatctcttgacctcatgatccacccaccttggcctcccaaagtgctgggattacaggcatgagccactgcacccagccagttatttcttgattatatgctaaacaaggggtggattatttattcccattgtagaccatatagggtaacttcctgatgtttccatggcatttgtaaactgtcatggcactggtgggagtgtagcagtgaggatgagcagaggtcacactcattgccatcttggttttgttgggttttatcctgctccttactgcaagctgttttgccagccaggtctttatgacctgtatcctgtgctgacttcctatcttatcctgtgacttagaatgcctaaccatctgggaattcagcccagtaggtttcagccctattttacccaccccctattcaaaatggatttgccctggttcaatatgcctgacatttcctccctcttttgtacaaaaaaaccccttaatcataagggttacagaggaatgaaaattcatcttctgtaactacttcatgctgtataggggcgatgatattcttgcttaactattagagtcttttgtatttgaggtagagaggagctcaatcggaactcatcagtatgtgagggccattcataactgttgagtttcaaaaaaggggttatctcaaagattagtaagtgtttaatttaagaaaacatctaggctgggcgtggtagctcatgcctgtaatccaagcactctgagaagcctaggcgggtggatcgcttgaggtcaggagttcaagaccagcctgaccaaatgacgaaaccctgtctctaccaaaaatacaaaaaattagccaggcatggtagggcgcgcctataatcccaggtactcaggaggctgaggcaggagaatcgcttgaacctgggaggcagaagttgcagtgagccaagatcgcgccactgcactctagtctgggtgacagagggagactccatctcaaaaaaaaaaaagaataggaaacatccagaaagtttatcctgcatttctacacacagagtacaactgcaatatattttacaagttcaggcagccgcttcttggtagcaaaagggtcgtttccagaagtcctgtcagctctcaagtttccccttttggaggggaaagagctccccatgtcctaattctgtcactcatagacaccagcaaacagtgcaagacagattaatccaaaaagaatagcaattaacatccagtggtgtgaaaccagttcttagttgagactttactgagagcggtctctaacctacatcttaggaaggactataaccttcctaagttgggtcttgaatccaagtacagtcaagcatccttgccttgttttagaggctcctttaacccacgctgtcttaggagagactctgactttcctaagttgtgcctccaacctaatctcatcctttacccaggtatatggactcaaagtcagccaattggtatccacagataatttttctgggggagggacagaagtctcttcagtatagtccttttgtggttgccaggaaaatgttactagaaagaagtcttgatccataccccaagagagggttcttgtatcttgctcaagaaagaattcagggcaagtcataaagtgaaagcaaatttattgagaaagtaaagaaataaaagaaatggctttctccataggctggttgcacatttttatgtttactttttaattatatgctaaataaaaggtggattatttatatatctcctttttagacctttacgatgtaacatcctgatgttgccatggcatttgtaacctctcatggcactggtgggagggtaacggagaatgaccagaggtcactctcatcaccatcttggttttggtggcttttatcccacttctttactgcaagctattttatcagccagatctttgtgacctgtatcttgtgctgacctcctatctcatcttgtgacttagaatacctaaccatctggaaatgcagcctggtaggtctcatccttattttactcagcccctattcaaaatggatgctgtgtacctctgacagattctgtgtctggatgtgtaataaataaggaaagagagcaccatctaagtcataatgggaagggtatttctttctataaactgttcctgaagaacacaaaggatgaagaattttattaatcacagctatttactagggttatgtatgtgtttcatctttctacatctttttttgtcctatacatttcttctatttgactttcctcagttgtatattttataataaactggtaaacataactacagtgtttttctgagttctgtgagtagctcgatcagataattgaacttgagaaagggctcaggagtccccagtttttaaacagtagctcagacacatagatgggcctatggggtttgtgactggcatctgcagtgaggacaatgttgtgagactgagccctgaatcagggtctgtgctgactctgggtggtgtcagaattcaaatgttagacattgagttggtgttagagaattgcttgatgttcagcaaatgctacagatttggtgccagaagaaagatatcacagacgcctggcctgcagtggaactccaggtgtctgaaaatggaaggctctgctctcctgtacacagactgtcatactgcccattgtcctgtgattccaggtctcctcttagggtgagagaatgaaaactcagaggaaaggagatctaatgacagaccctctgtctcacagctgccaccacaggattcccacccactcacaaacacacccactagacattgatgtgtccacactcctcccaggactaggcaccaccatcaggaacttcaccacagcatatttgatcctagggtttcttgccaaaaagacgcaaaagtgtctacaactctcctggcatatccccactgtatctgcagcagtaacctgttttctccatctacctagcattatggagcacctgttcataatctcatctgcctgcatggacacagaaataaatcagagtacagccccactgggaccactatctgcagaacaaacagttctttccagttatattgcactcttctgcacgcatgggtttttcttaacttttctttttggttcaggcatacacgtgcaggtttgttatataggtaaaattgtgtcatgggggtttgttgtagattattttgtcagtgagttcctaaacatagcaccaaagaggtatttttttctgatcctctttgtccttttatccttcatcctcaactaggcctccatgactgttccttctttatgtccatgtgttcttattatttagctcttccttataaatggtgacatgcatttggttttctgttttgcgttaattttctaagaataatggtctccagctccatccatattgctgcaaaggacttaatcttggtgttttttgtttgtttgcttgttttttgagacaaactctttttttttcttttttttgagacgtagttctgctcttgttgtccaggctggagtgcaatggtgctatctcggctcactgcaacctcagcctcccaggttcaaacaattctgcctcagccacccgagtagctgggactacaggtgcatgccaccaagccctgctaatttttgtatttttagtagagatggggtttcaccatgttgctcaggatggtcttgatttcctgaccttgtgatctgcccacatcagcctcccaaagtgctgggattacagacagaagccaaagcgcccagccagacaaattcttactctgttgctcaggctggagtacaatggtgtgatctctgcttactgcaacctccacctcccaagttcaagtgattctcctgcctcagcctcccgagtagctgggattacagatacttgccacgacgcccagctgattttttgtatttttagtagacacggggttttagtatattggccaggctggtcttgaactcctgatctcaagtaatccatctgcgtcagcctcccaaagtgttgggattataggcatgagccacagtgcctggctttgtgtttttatatggccacatggtcttccttgatttttatgtaccatattttattttgattaaatctttattttatttttggagacagtgtctcactctgtcacataggatggaatgcagtggtgtgatcttggctcacttcagcctcaacctccaaggctcaaggtttaaggaatcctcctacctcagccccttaagtaactggaactataggctcacaccatcacgcctaatttttctttttttattttttgtagagatacggctttgccatgttgcccaggctggtctttaactcttgagctaaggcattccacctgccttaatctcctaaagtgctggcattacaagcgtgagccacctcatgctaccatattatattttttcaatctagtctaccatcaataggcaattaggtttattccgtgtctttgttattgtggacagtggtgaaatgaacatgcatgttttaagttttgcatttaagtcttcaattcaggttgagttgatttttatatatagtgtaaggaaggggaccagtttcaatcttctacatagtgctagctagttattccagcaccatttattaaatacagaattcttttcatattcctgtcaggtttgtcaaagatcagatggttggaggtgtgtggcattatttctgggctctctattctgttgcattgttctatgagtctgtttttatgccagtataatgctgctttggttactgtaatgtagtttgaagaggggcaatgtaatgcttccagcttcattctttttttttttttttgagacatagtctcgcactctctcacaggctggagtgctatggcatgatctcagcttactgcaacctccacctcctggattcaagtgattctcctgcctcgccctcctgagtagctgggattacaagcacacaccaccatgcctggctaattttcgtatttttagtagagattgggttttaccatgttggtcacactggtcttgaactcctgacctcatgatccgccaacctcggcctcccaaagtgctgggattacaggtgtgagccaccatgcccataatggttgaaagctttttaaacatctattgaaatgactttgtggtttttatctttaattgtgtttacatgatgagtaacatttattaattgtatgttgaaccaaccttttatttcagagatacagccaagttgatcatagtgcattagctttttgatgttctcctggatttggtttgccagtattttgttgatattttcatcaatgttcattaaaaatattggcctcaagttttctattttttgttttatatttgccagattttggtatcagaataatgctatttttatagaataagttggaaagaagtccccttttctcaatcttttgaaataatattagtagaagtggtaccaactctaatttttacatctggtggaattcagctgtaaatttttctgattctttgttgtttttggtgggtaggctatttatttctaattcaattttggagctcgttattggtatattcagggattcaatttcttatttgttcagtctttggaggatgtatctttgctccaagtttacaatcctcaagcttggcccagatgaagtctctacttatattcatgttgcctcagtttttttcttttaggtagacatattacttagaatgtgctagagcagcctctatgaagggatctcttctttgactgtactcggcttgctgtaatgcccaaggatgcagagtcaggctaacctcacctagaacctgcacataagttctggcctctgcctgggatttacaagacagggccagactttgggttgagaatgtactgaaaaccaacaaaaggcattttctgtattgtgagatgtcagtgtagaaatcttaaagcccccatttgagaatgtggctctttaagcttttcaatcttgttcagtgacctgctacagtatgtgagaggctcctggtgtaaatagaatctgatgatagaatctgtaagtgtaaacaagaatgagagatcaaggccacaaagtatccagagccataaccacaactatacctaccggtaattgtgatattggagtaaagtattctcgtccttcttcttacccaaaagctagcaaaaatcaggataggtgacccaggttctggggctccaccaaggcagttccattttctatttagaatcagcctgagtttctccagcctggcttatcactgggccatcagccctgggtcactgggaatcctctcctaatcacctgggtgtccttaagacatttgaggatgtcaagggtagaattatgtcaggctaacaagaatgattaattatgtttctgtctcgttgtaagagaaaggagacatcctgtgtttttttctccctcatacaagagataactttggttgttacccagatgagagtttctcaagttttctggtactagggtgaaagacaaagaggaggtctggtgactcaaacaaactaattgcttccacttcatatggtcattcaaaaaatagatgaagcagtcaaggtccctaccatccaggaaattttagtctagactagcaactggatacatggttgaattaagcattatatggttggtacagtgaatagaagtgtgcaaaaaaaccttggtccacttctttttaatattgttgtgacttctgaagttatcacctgaacgtatatttatggactgaagagttattattatttgtgtttcttttacttttctaagaatacatatttatcttctaataaaattatcctagaaaactttaaaagatccatttaaattgcttattagtatatgttataaaattgacagcagtggcaaaaatagattagtgttacataaactctgggatttaactttttttttcttttttcttttttagacggagtttcgctcttgttgcccaggctggagtgcaatggcgcgatctcagctcacctcaacctccgcctcccgggttcaagcgattctcctgcctcagccttccgagtagctgggattacaggcatgcaccaccaccctggctaattttgtatttttagtagagatggggtttctccatgttggtcaggctggtcttgaactcccgacctcaggtgacctacctacctcgacctcccaaaatgctgggattacaggcatgagccaccgtgccaggctgggatttaagtttttcttaggtaaacttaggaaaaacagaactggaaatactccagtgacatagaaaacaaattctacctaggttcttttccctgccccagttctgatcagattcaccatttttggaggccttatttaggtctggcctcactctggagtgttcccttacaaaactgatttataaagattcaagtttttgggggtaaatcctgctgactttctagagctgctgctcacagtatcctgaaacccaaaagcagatacataagaaaaataaactatacattttaagatcttaatttttaaattttgtagtaaaaccagtgcttacagaaacgttccatttagcagattttctgttcctgcagatccagtagctgctctacaagtcataaacaagtaaacataaacacaaaaaaatttctctaaactacattctaaatcctgagaattattgaacacttagtatgaactttcaaggtgttagtaggacataataacaaataataacacataatgtgttattcccagcacagtgctctgcaacatactattgagcacatagtacctgcttaataaacattgcattagttcatgtgtacatgttgttttttaaatgcagacttatttagacattgctgccttctgtgtcctctgtaaactttagagagccagcaaagaatatgaaactttacattttttgtctttatttgggtatcagaagtattgtattgtgacaagagtgcggcatgtaaaggactctgtgctgtgcctgctttctctaactaatgctaataatgagcccaaggggagcaacatcagcattgacacgggacttgtttgaaacacccatccatggaccctttccaaacctacagaatcacattacataaagtgggaccaacgttaccaagtgatttttgagctcattaaaggttgagaggcaatgcttagctaagtggttatcagcctagacttctcattagcattacatggccaatttgcagaaatctctttacttgtaccctttccacaggttctgtttattgttctaggtgaaagtattcatgttgttttaattgtgtctcatgtgactctaaggtgaggccagaatcaagtgtgtggggttcaagatacattcatgagagttaagttccacctttgcactaaaaggtagtcacagggaccgttctgtttggttttgatagggagaggtcagtgtcacccatatttccattactgtagcagaaattgctggtgtttgtggcaaaagcaggcacctgaagacagaaatagagaaacatatttttatattcattgagcagttcattgttcctgaatctctgctgttataaaggacagaaatgggtgtgctttttctgcagttcttagttcttttttctgtgggtgtgagactagcaggtaaacaggtggtgctgacgccttttaaggaattttttcaagacacaggtgtaacttctccagagaatgtcatctgaaaagcatttccaaagaagacaaaagaggaaaaatggctttttttttttttttcagctaaacatgtgtcagatgaagagctgtgtccactctgcctcctggagtgcgatgcatttagtccttgcaaacatttacttctctacttgtgtttctttcccctaatgagtttaactactataaaaaattcttgtggtagtcaagggtctctgcaaagtatctctctcctatatcccagagccttctctacactctctaaatcatggcttcttatacgccatgcagaattcttaccaggaatttttgatctgcactattaaaagtgtttcccttgttgctgttgaacgtggaaagatgtggatactcaagattcctattgggggaacgtccttagtaaggatggagaacatgtaatgttgaggtttcatatgtgttcttcattagctctgttcagaacaggattaagaaaatgcttatttaaactggatggcatttattactctgaaagttctgaaaaaaaaattattgcgagatacccgctttctagggtgctaaagaaagactactttaaattgttattaaaaattacagaacatagaagatatctgcatcttgaactctgcataaaactgatttttctgtgtggttaaattcagactatactttttggggggcaatatctcagtaatgatgctgtgttcttcggtgtgcgtcagcacatcacaaaaatttgtccttgtgcagttgattttaaaatttacttcaagagctcttggaaatattcatttcactgtagagttaattatttttctcctcattattaagtatctttatgtagccaaagaagagctgtgcataaatcatcacatttaatctggcagctgcctttctttcttaggttttctttgcatatgtctatctttagaaaatgaagactcttatctttgtttacaggccagaaaaatggggtaaaacacaggctcttccacttactggatgtttgacaaaatgttctttttgggcgaaatacattggcattactagtgagcttgttagaaattcagaatctcagactttatttcacatcttctgaaaaaaaaaaatctgcataagatctccagtgtattgtacacattaaaacttgagaggtgctgtctaactcaacatgtcatttttgcctaaaaaatatgcactactcattctttgtgatgcaaatataacactaaaaaatatacatgtttgtgttcatgcctttcgtttttatactttattgttcataaaattatcatatatacagcggtattgtggatcttataccattctcttctctcagagttagagaatacattagagaatatttctgtgttgaaaattgttggatgatttcagttattcctgtaagtcagaaccaattttctttactctctcatttaaccttaattcaaatgataaattctgcccgtggacacttgtaaatatgtgtgtgtgtgtgtgtttttcaggggccgttgacatttagggatgtggtcatagaattctctcaggaggagtggcaatgcctggacactgctcagcaagatttgtataggaaagtgatgttagagaacttcagaaacctggtgttcttgggtgagaataactttaatacacaattccttatatacactaaaggtttcatttctccatttttgtagaataatttttggtagtttatgctttgcataaatgcgtttctgatccctgttttcaaaaaattgcgaggaattatccatgcagaaaaaaatttcctcaagatgttttatcttagcctgaactttttgcattcctgagctggtctgtacccttcactctagagtagtggtaatctcagaaatttagtagtataaaatattgttgcccataggttaaaatctatttgccaccactaatttttgattcatgagcactgagtagcaaaattaaggacctacaaatttaaaatattttctaaatgtaagaactttctgtcattaaatagtattttgggatgaattttctagaatattctattacctcctctttactaagcacagtaataggtaggtaattagagaatatgagcaagattcatgttatttatttttaataaatcaggtattgatgtctctaagccagatctgatcacctgtctggagcaaggaaaagatccctggaatatgaagagacacagtatggtagccacacccccaggtaggtgagagtgaataaaacagttgacatagatgaaaggttggaagattacaaaaaaaaaaaagcagtccctataatgtgatttgggaagctgtgttccaaagcaaatagattctgggaagcctgaggtgtgtggtttttttgtttgttttctttttgttgttgttactgtcacatagggccatcttctgtcttaggcttttaaattctctaaggattctactttcccttcattgattttccttcaagttcacagtgagagccagagtcctcttcatggcatataaaagactgcacaatctgactgcatttccattgttttgggggacacacaaatatctgcatgattttgagaaactttatgttaaactatttttttagttctcttttgcatcatgtctaaaatgtgtgagagtagtggtcactgttctattggtttttatgttaattttctgcacattccatctttttttattagtatattcttgaaatatagtctgaaattataaaatataatgtctctctgctttgttctttttcctcaagattgctttggctattcaaagtttattgtagtttttttgttttgttttgttttttgttttgagatggagtttcactcttgttgcccaggttggagtgcaaaggcgccatcttggctcatcgtaacctctgcctccagcgattctcctatgtcagcctcccgagtagctgagactacaggcatgcaccaccatgagagtttttagtaaaaactcatgtttttataaaaagttttattaaaaaattggatttttagtatacttgccttggcctcccaaagtgttgggattacaggcgtgagccactacacccagcctttttttctattttatactttcattccattttggtcataggatgtaattcataaaatgtcaaatttaacaaatttttatgactccgtttttggcctaacaggtggtctatcaaagagaatgttgcataagctattttgaaggatgtgtttcctcatattcttgaggactcttctctatttctctgttaaaaataattgtacaggctgggcgcagtggctcatgcctgtaatcccaacactttgggaggccgaggcgagcggatcatctgagtttgggagtttgagaccagcctgaccaacatggagaaaccccatctctactaaaaatacaaaattagccaggtatggcagcacgtgcctgtagtcctagctactcaggaggcggaggcagaagaatcgcttgaacccaggaggcggaggttgtggtgagctgagatcgtgccattgcactccagcctgggtaacaagagcaaactccatctaaaaaaaaaaaaaattgtattatactgccttcagttcctctcttcacttactaatattctgtcttgttttatttttattacagaaagtggggtattgaaatttcctactataattatattgctgtctaggtgtttcttccagtctgtcaatatttgctttatatatttggaaccttagtgtgacatacacacagacacacagacgtgcacacacacacacacacacacaaaatttgtcataggttcccagttaataaatctattattgtttaatgtctttctttgtctctttgcagttttgacttaaagtactttatgtaagatatgacagtttttgacttaagatgtggcttttgtaatactattttgacctcttctgctctcatttggttaatatttgcatgcaatgtctaaatctatcttgccaccttcagtatgtttttaatcattagatgtcagctgacccttgtagaaaggcaaattggatcttggtttttaataattttaaataaatttctttattgaaagtatgtctcttgattggaaagttttctgaaacaaagagacttactaattttttttgttgttctatttgattcttgcatctttgtcccacattttctctctttgtttctctctgtggctgttttatttttactttgatatgcttttacttctttcttatgttgttttctgtgtctatacaggcatattctttgtggtacgtgggggattacataaaacctttaagagatacaatgtatttcagtctagttaaaaatgaacttttgttgcatgcaaaaattttttctcattacatatgttctcagatttgttcttgatgttgctaattatatttttatatgtatatttattaacatgtttataatgatttctatgcctttatctttcaaattttggggaataattaaaaatttcttctgtgccattatgataatgctaagaaatgtatttttgtgtatgtgcgtatctttcccagaaaataatgtgttttaatatgattttgtgttgctttgttaaatcatcttattttcattggaagcaactgttttcagcaccttttatatgtaaggaagtaccaatatactttttaaaatttggttatttttgaagtttgttttctttttatttagcaggacagatttggtgatggtattatactcacttgataactattttcttcagatttcactatatcacacagttttcttctgtcctgaaaaatttttgttgagaatccactggctatctcataagagtattcttgcaaataatatcactttttttttttttttttttgagatggagtttcactgttgttccccaggccggagtgaaatggcgcgatttcacctcgctgtgtcccaggttcaagcagttctcctacctcagcctcccgagtagctgggattacgggcatatgccaccacacccagctaagtttgtatttttagtagagacagggtttctccatgttggtcaggctagtctcgatctcctgacctcaggtgattcacccacctcagcttcccaaagtgccgggattacaagcttgagctaccgcgcccagccaacacatcacttttatcttgcagctcccgagattctcttttctgtgacttttaaaattgtgcttacatatgtgtttgatataaatatctttgtattctagtttgtttgttcagcttcttcatttttacatcactttttaaaagatttctgttattttttatatttttttacctccataatttctgtttttccaatattttaaatatttctgttcttatttccagttttctgattttctgtagttctctgtgttcatattttactcattgagtattcaatttattttgtttttaaaattaatgtatacattttttatttctttctgaaaaatttataataattttgttggtactacattgccctgttttgtatatattctaatcttttattaaaatttgcacattaaaaaaatgttacctgtcccagtctttgtaatgtggctttctcctggcatactttgaacaattgtctgggttagagattctgagagtctctcagacatattcttacaatgtgtcttgcctgaaattttgtgtttattttttagttaaaggaaattattcatcttctttgttaatactcagtaatcactcactgcacctgttttctttctgtggtcctgcagtctcttcactgctttaacatttacctttgatctcagcagacacaaactgtcattccaaattataccaccatttctttcagcactatatgtcatgggtgacagaaaccagtgtcttcaaaggcccctacaagcaagcaataaagatacatgagccagtattttacttgtgttttttaaatttttttttttaaggccacatttttttaattgacacctcaatctctacatacatacagtattgcacgaattataagtggatcaacaattatattattgatacaaactcatgagcatttacataaaactaccgctctaggttttggtgtgttttgtgccagctactttagtgaataaaagaaacataaaggaactcaactacttgaattcatgagaatcagctttcaataaaagcatatgtgtcatctcatagaatacttaatatgtcaaacccaggaaaatcagtaactaagtaacaaaaggaacacttattaagaaaatttgatgataaaaatgttaggctaaaatattaagaactttagcaactggactgaggaaccagaaagtatatgcacactgggaattttaagaaaagatccccatattctcctgcacaatgaggaccacattccaaaaacataattctgggttgttacaatgtcttctctgctacaaaccatagtttcaaagatgaaagaaacaagttcacataaaagggttttaaaattcttcccactcaaaataaaataaaaataatatgatctccatcaaattataaagaaattctatcaaaatggtgaccaaataaagaagtcagaccatttgccttcactgactgcctcagagggcagagcatgtgtcacctacaaggaaggggagatgggggtagagtccccactctcccctggcctgtggagtgggggtggacaggagccctttggcttccctggggttttgcttcctcacatagggaattgagggaggtgggctagatggctttaagagacccctcaactaaaagaatcaaagtcagcttgagatcctatctctgagcaggcacataaggtggcaaaagaaatggattaaaaaacagatggatgatgtctttctcaccttttaataccatcactgagaactaatctgtactatagttgaagaaaatctttgcccggtactattatagggtactcaatgaggcatctgacaatgaaatttttcatacaaatgtataaaaaggctatattaagtttgggtgggaaaacaatgcaccaccatgttactaccagcagtcaggacgtcctgtctcagattttaggagtcaccgatctgtttgggagaaatgctgagggggatgcatgttcaagccattcagtagagagctaaggagggcacactgttcaggaaatggataaacaggtgcccaggaaggcaactttaatgaaactgtttctaaaacaaaggatataagagacctaaatgatccaaggagagtgatggcttctcattttctgtcccctaatgagaatacaaatatttcttctgggatctaacacactagcttcattttcaagatgcatcactttattttccttacaaggcagcagcacattaagcacgtgagagtcacatgatttctgcagtgagcaccaaggcttccaggagttttcttggaacctacagccagaagagtcctgagatttcaaatattaaagctttctctacagccacacgtccctttgatgtttgggttattgaacacaaactcactggataatttgtcttcaacatagtccatttccgctcctaaaactgttagctttgctttctttttgatgaatactctgactccatcttgaataacttcttcatcagaatctccttttgtctttgtatattctagagtataagaaaggccattacagaccctggtttggacaccaacttttacacctacaagctcaggcttacctttttctttttctttttttttcgagatggagtctcattctgtcacccaggctgcagtgcagtggcgtgatctcagctcactgcaagctccgtctcccgggttcacgccatactcctgcctcagcatcccgagtagctgggactacaggcacctgccaccatgcctggctgattttttgtatttttagtagagatggggtttcactgcgttagccaggatggtctcgatctcctgacctcgtgatccacccacctcggcctcccaaagtgctgggattacaagcgtgagccaccgcgcctggccaggcttatctttaagaagttgttttactttggttactgctgaaggtgtcagggtgagggcggcctgggtgggctgcagcttcctcttgctcacagcctggacagttgcctggactaaggaagctgacatcttcaccatcccaatgccccagtgcctcaggccagagctcggctgcctcagcctgtctccatggacatggcaggtgcattctacttgtgttttttaaaatacatatataaaatgttggcaatttacttctttttttctttctttctttttttttttttttttgagatgtagtcttgctctgttgcccaggctagagtgcaatggtgtgattttgactcactgctacctctgcctcctgggttcaagcaattctcctgcctcagcctcttgagtagctgggattacaggttgagccaccacgcccggctggcaatttacttctttttgtttttttttttgagatggactcttgcactgtcacccaggctggagtgcaatggcatgatttctgctcactgcaacctctgtttcctgggttcaaacaattctgcctcagccttctgagtatctgggactacaggcacacaccaccatgcccagctaatttttatatttgtagtagagacggagtttcacagtgttggccaggatggtctcaatctcctgacctcatgatccacatgcttcagcctcccaaagtgctgggattacaggtgtgagccaccacatctggggcaatttacttctaaaggcattatgttatatcggggagcaggaacagctgtgttgggtaagtgtaacaaacttttttttcttctgtgtgactttttgcattgtgctcacttggggtactttaaacatttagttcatttataattttttctcagatgtattttcgttagtatgtttttgttacatatatatgtctataaaaaattagggcctttggtattttgctatatcatcttgtatatgtagtttgtataatgtcatagtttagatttgtaatctatatttatctgagtctagtaagtggagtaacttgatatttttatttctttcagttacatattctcattttgcccaggacctttggccacagccgggcataaaagattctttccaaaaagtgatactgagagaatatggaaattatggacataaagatttacagttaagaaaaggctgtaaaagtgtgaatgagtgtaatgtgcaaaaagaaggttataatgaactaaaagagtatttgacaactacccagagcaaaatatttcaatgtgataaatatgtgaaagtctttcataaatttttaaattcaaatacacataagacaagacatactggaaagaaacctttcaaatgtaaaaaatgtggcaaatcattttgcatgcttttacacctaggtcaacataaaataattcatattagagagaattcttaccaatgtgaagaatgtggcaaagcctttaaatggttctcaacccttactagacacaagagaattcatactggagacaaatcctacaaacatgaagaatgtggaaaaggttttaaccactccacaactcttactagacataaggtaattcatgctggagagaaacactacaaatgtgaaaaatgtggcaaagattttaaacagtcctcacaccttactaaacataagacaattcatgctggagagaaaccctacaaatgtgaaggatgtggcaaagctttctgccaattctcataccttactaaacataagataattcatactggagagaaaccctacaaatgtgaggaatgtggcaaagcttttaattggtactcacaccttaccagacataagataattcatactggagagaaaccctacaaatgtgaataatgtggcaaagcctttaatgtattcgcaacccttactagacataagataattcatactgaagagaaaccctacaaatgtgaggaatgtggcaaagcttttaaacagtcctcaaaccttactactcatgaaaattcattctggagagaaaccctacaaatgtggagaatgtggcaaagctttcttcagattctcataccttactacacataagataattcatactggagagaaaccctacaaatgtgaagaatgtggcaaagcttttaactgttactcctaccttactgcacataagttgattcatactggagagaaaccctacaaatgtgaagaatgtggcaaagctttctaccgattcatttaccttactacacataagagaattcacactggagagaaaccctacaaatgtgaagaatgtggcaaagctttctaccgattatcttatcttactacacataagatgattcatactgtagagaaacgctacaaatgtgaggaatgtggcaaagcttttaactggtactcacgccttactacacataagagaattcatactggtgagaaaccctacaaatgtgaagaatgtggcaaagcctttagtgtattctcaacccttactaaacataagataattcatactggagagagaccctacaagtgtgaagaatgtggcaaagcctttaatgtattctcaacccttactaaacataagagaattcataatggagagaaaccctacaaatgtttagaatgtggcaaagatttctaccaattctcataccttactacacataagatgattcatactggagagagaccctacaaacatgaagaaagtggcaaagcttttaactgttcctcacaaattactagacataagataattcatactggagagaaaccctacaaatgtgaagaatgtggcaaagctttttaaaaatcctcaaaccttactaatcataagataactcatactggagagaaaccctacaaatgtgaagaatgtggaaaagcttttaaccagtcctcaactcttactagacataagagagttcatactggagagaaaccctacaaatgtgaagaatgtggcaaagcttataactggtcctcaaaccttactaaacataagaaaattcatactggagagacaccctacaaatgtgaagaatgtggcaaagcttttaaccaatcttcaacccttactatacataagataattcatattggagaataacactacaaatgtaaaaaatgtggcaaaccttataaccagtactcatactttactacacataggagaattcatgcggaagagaatttctacaaatgtgaagaatgtggcaaaggctttgactggtcctctacccttactaaagataaaagagtttgactgggtgcggtggctcatgcctgtaatcccagcactttgggaggctgaggcaggcagatcacctggtcaatggtcctctacccttactaaagataaaagagtttgactgggtgcggtggctcatgcctgtaatcccagcactttgggaggctgaggcaggcagatcacctggtcaagagttcaagaccagcctggcccatatggtgaaaccccatctctactaaaaatataaaaaattagccaggtgtagtggtgcacacctgtagtcccagctactctggaggcctaggtgggagaatcgcttgaacccaggaggtggaggttgcagtgagctgagatggctccactgcactccagcctggatgacagagagagactctatctccaaaaaaataaataaataaataaaaaaaataagagagttcatactagagagaaaccctgcaaatgtgaagaatgtgagaaagctcttaaccagtcctcacaccttactgcacataagagaaatcatactggaaggaaaccctacaaatgtaaagaatgtgagaaagcttttaactggtactcatgccttactgcacataagataattcatactggagagaaactctacaaatgtcaagaatgtggcaaagcttttaaccggtactcaacccttactacacataaggtaattcatgctggagagataccctacaaatgtgaagaatgtggcaaaggtttttattgattctcatactttactaaaaataaggtgattcattctggagagaaattctacaaatgtgaagaatgtggcaaaggctttaatttgtcctcaacacttactaaacagaattcatagcagagagaaatcctacaaatatgaagaatgtcacaaagcttttaaccacttctcaaccctgatgacacataaggtaattcgtgctggagagaaaccctacaaatatgaagaatatctcaaaactttttatagattctcataccttattaaacataaaatcttacaggagagaaattatacaaatgtgaagaatgtggcaaagcttttaagaaatcctcatccattactaaacaagataatttgtactggagagaaaacctacaaacgtgaggaatgtggcaaagcctttaatggtcccctcaactttctgcacataagataatttatactgtggagaagccttacaaatgtgaaaaatgtagcaaaccttttaactaatcctcaacccttactacacataagataattaatgctggagggaaatcccacccatgtggcaaagcttttaatcaatcctcaaaccttactaaacataagataactcatactggagaaaaatcttagaaatgtgaaggatgtggtaaagccgttatccagtcctcaactcccactaaacataacataattcatactggagagaaacctcacaactgtgaagaatgtggcaaagcttttaaccagtcctacaaacctttttgaacaaaataattcatacaggagagaaacactacaaatgtgaggaatgtgacaaagcctttaaccagtcctcaattcttaccaaacataagaaaattcatattggagattaaccttatgagtgtgaaaaatatggcaaaagctttaactagttctcagttattattattatttttagagatggagtttcactcttgttgccaaggctgcaatactgtggcatgatttcagctcactgcaacctccgtctcccaggtttaagcaattctgcctcagcctcccgagtagctgggattacaggcatgcaccactatacccatctaattttgtatgtttagcagagatggggtttctccatgtagatcaggctggtcttgaactcctgaccttgtaatctgcccacctcagcctcccaaagtgctgggattacaggcatgagccaccacgctcagccactagtcctcagatcttaacacacataagataattcatactggaaagaaactccacaaaccagaaagatgcaataatgcttttgacaacacctcaagcttttctaaccataaaaagaatcatattggtgagaaatcctagaaatgtgaagaatgtgacaaagtctttaaatggttgtcatacttgacttttttctttttttgagatgaagtctcactcttgtcccccaggctggtgtgcaatggcatgatgtcggctcactgcaaactccgcctcccaggttcaagtgattctcctacctcagcctcccaagtagctgggattacaggcacctgccaccacgcctggctaatttttgtacttttagtagagatggggtatgaccatcttggccaggctggtctcaaactcctgacctcaggtgatccgcccacctcgggcctcccaaagtgctgggattacaggcatgagccaccactccctgccttacttgattacattcaatataattcatactggaaagaaatcctacaagtgagagcaatgtggcaaaacttaaccaccttattgcacagaaaagcatttatgtttgagaaaaattatacaaatacagactgtgaaaaagacattaatatctgcttacatcttaacaccagagagttcatacttaataaaagcaagataagggcaattactgtcaaaaggtctttcagaaaaatataaccctttaaagtgaagaagagaatttatattgaagatggacattacaaacataaagagggttgtagtacctttacttgaatcaaattttattgtacacattttgtactagaggaaaactctgaagcagttgctcaagctttgttcaacattagggcacttatattggaaaagtgtcttgcagatataataaatgtggaaaaacactttttcaaaaactacatcagaaaacaccagagtttatactgaagaatatttttgaagatgcactaaaaatgaaaaaatatttaatccaaattagggctatgtaaatatcagaatttataatagaaatatataaggaactgacactgcagatatactaagtcaagagttctgagtatagaaaataatctaaaactaaagttgatagaaaaagtatttgtatataaatttaagaggagtaaaagattttttgcagagtaataactacattctaagtatactttatttcttgaaaaaattacagactttgaaagcaaatgatgtaattcaacactcattttctggtgtttcttcattcttattcacttgtgaaagcatgtgataattgttgcatcaaaggtatgagagattcttttccattaggtgggcatttatgatcttttctatggacaagtaaggacattagaatgtaagatgcatgatgaaaaagtggagaggttctttgtggttaacttatactcttgagtgatatatgaggtaggtgttaagagtattgttcttttgcattatgagaaaactagtagtatattattagtatattattgtactaattgtacttttatataataaaatgcagcacatttttaaaattttacattatgtgtgaagttaatggtttcaacatttttaacatgttaatctcttgccagtggctttaaagtatagataaattaaataataatattcctgttgggtaaatatttattcttattttaatcaattaaatttatttttcttaatttttgtgggtatatgagtatatatacttatgccatatatggcatattttgatacacaaatataatacataataatcatgtgctaaatgtggtatccgtcacctctagcatttatcctttgtattactgacaatcgaattctacacttttacttattttaaaatgtacaattatggccaggcacagtggcctcacacctgttatcacagcactttgggaagctgaggcgggcagatcaccaggtcaggagttcaagaccagcctggccaacatggtaaaaccctgcctctactaaaaatagaaaaattagctgggcatggtggcaggcacctgtaatcccagctactctggaggctgaggcaggagaatcacttgaattcgggaggtggagattgcagtgagccgagatcgtgccgctgcactccagcctgggtcagagagcaagactccatcaaaaagagaaagaaagaaagagagagaggaaggaagggaagaaagaaagaattggtctctactcttatgaaactttcagtataatttcataaaatcctcatgcattcctgagaagtggatacctctgaagtttcctaaagccctactaacccaaagtaaccagtatctgaattttgtattatcatttactttatgcaattttatctataaacaatatacgtttcagtgttgccagatttttggctctagataaattctacaatttttcatctgtgacttgcttttttatttacaattgtttccttctatttttccatgttgctttgcatagctacagttgtccatttcactgctgcatagggtgaatatacatcaatttttaaaccaattctatagccagtggttatttgtgaattccaattactctatattttaccaactcttggaattactagacatattgaggggtgaagccagctggacttcctgggtcaaatggggacttggagaacttttctgtatagctaaaggattgtaaatgcaccagtcagcactctgtaaaaatgcaccaattagcactctatgtctagctaaaggattgcaaacacaccaatcagcactctgtaaaaatgcacccatcagcactctgtgtctagctaaaggattgtaaatgcaccaatcagcactctgtaaaaacccaccaatcagcactctgcgtctagctaaaggattgtaaacacaccaatcagcactctgtaaaatggaccaattggtgctctgtaaaatggcccaatcagcagtacgtgggcagggccaaataagggaataaaagctggccaccaggagccagcagcagcaacctgcttgggtccccttccatgctgtggaagctttgttctttcactcctcactataaatcttgctgctgctcactctttgggtctgcaccacctttaagagctgtaacactcaccacgaatgtccacagcttcattcttgaagtcacctagaccacaaacccaccagaaggaagaaactctggacacattggaaggaacaaactccagacacaccatctttaagagctgtaacactcactgcaaaggtctgcggcttcattcttgaagtcagcgagaccaagaatccaccagatggaataaattctgggcacaatattttttgacaaagtggagaatcagaatggtatatcatttatagttttaattagcatttctatagttactaatgaagttagcatttttagaagttaattggtcaattgtgctttaagatgtgccatctgtctatttttaatgtatttcatttctttttgtattcatactctataaggtatattgtctaaatactaattttttgtaatatgcgtttttgtagatttttgtcctagttatgatttgcctttccaccatctatatttaaacatgtttttataagttcttaatcaaaaattcttagaatttggtctaatttataatgtgccatgtttaagacattgttttaccccactgttataacaacaataatatcctgtattttctcctaaaagttttaaattctcaatctatgtgaaaaattgttgtgtcagttgctgtgcaggaatccaatctacccagctagaaccaattgtttaggtactagcttattgacttgttctactttgccagtattactgtaatactgagctctcattttaatctattggctgggaccatagatgcaatatttaataaaaatgttgatagcagcatccttataatgtttatgacatcaaaagacaagttttcatggtttatcatgtacatttgctgtagtacattttagataccttctatatttagaaaataaaatttccttttatttttagtttgctaaaaggtttttaccaagccctttttctgtgcctattgtatatacacatatagattttacaaagtttaacttaccttgtactctcgagataaacttattcatggttttacttttttttttttttttttttgagatggagtctcgctctgtcatccaggctggagtgcagtggtgcaatcttgtcttactgcaacctctgcctcctcctgggttcaagtgattctcctgcctcagcctcccgagtagctgggactacaggtgtgtgccaccatgcctggttaatttttatatttttagtagagacggaatttcaccatattggccagactggtcttgaactcctgacctcatgatccacccaactcggcctcccaaagtactgggattataggcgtgagccaccgctcccagccgggtttacttattttatacagagcaagattcagtttgttagcaaatgctttaaaactttaaaatctgtctttatgaatgatacttttatagttattcatgttttgtctctgtcaatctttggtattaactctcagaaattgagttgtgcagtgtttttacttcttctgttttttgaaaggttaaataatatcaacagtatgcttttcatttttaaactttaaatgtctgaaagacttacctgtagagttttctgacattgacattttttgcatatgtgttaatttcatctgctctcatctagtttactagttctgtctagtgcacctaagttcaaatgtggttagtgagttcttttagttattgtattattcattccacaacttagttactttttaaattgttttatagtttctaatgccctgtagatactttcatttgtcttatttaaatatgttaagcctagtagtttttaatatttttgtcgataaatctaatattggatgtctttgcaggtttgtttctgttattccttcttctggtgtctttcacactgtcttctttattgtgagttttgccatctttggttgcttgctagtcactgttcatagaaaattactttcaagtttcatcaaggactggatgagatgttaccttctttaagaaagtttgcttttgcttctttcagttttctgaaaattttacaatgtggaacaatcatttggacaactttaagtaatgtggttcattcaaaatttatataactgatggagaaatttatgtaagatcaatgtgtggtgacaagattgtagaaatttctttctcttttgaaaatttttctttatcacctgccctcaacctcaagacaatcttgtatgccattcctcagtgttgggaagaaagggactgtttgggtcatacctagcctttgaactcccaggttaattttgagaaggtttttaaataatttccaagtgctaaacatccaaaagtacataataaatattaggtaacatcattatactagtaatcctgaacacaatattttaagtgttcagctgcactattgtgttctatgaaaagaaggtttttgtttagaatattttccaatagattgattacgtgttataaattgcaaatatgtttgtagtttgtataaggcaaagaatgagatgtttggattcaaggatgcataagatcaaacactaagacaattttctatgtagttgaggagaaagagtgggtgttgaaaaagccaatgcagctcatggattgcaagtttctgcctcctgctcccacctaatctggctgtgcctggctgccagcagccaagatttgctttaaaatactgaagaaaaagtattaagaaagccaaccccatagtctgtttacatacacaaatataaagcaatgttcttctctaatgtgaggaatatgttcaggaaagctaaaatgatttcagagtaagaaagtaaaaagttggcagcatgagcacatctagccctacatactgagttgcttttggagtgaagagctaacatgaaaggcaagagaaaaattagaaaataataattttgccattgagtactttatattttttatatttccatgaattccataaataacaaaattgtatgaatgcattttttctgtaaacattattttggatatagtgtctgactctgttgccccggatggagtgcagtggtgagtttacagctcactgcagcctcgatatacagtgctcaagtgggtctttcacctcagcctctcaagtagctgggactacaggtgggtaccaccatgtacagctaatttatttgatttttagttttgataagatctcaatatgttgccaacacttgtcttgaactcctgaactcaaacaatctttccccctcatctttccaaaacaggattacaaacataaacaagcacactttacccatataagtatttttaaatattacagacagcactttgggaggctaagacaggaagattgcttgaacaaaagagtgtaagatctgcctgggcaatgtagcaatacctcatccctacaaaatgaaacaacaacaacaaagagaatgctggtatcatgtgaaaatcactacactcaacctcagtgcccttttgcagacaaactctatataagtttgttttatctttacaaagatttgcatgtgtatgtgtgattttatgtacctttcgaagtagtattgcatgtgtgtttccttgggtgagatagtgtgtttgatggttataagagcaggctcaaagtacctgtaaaaccttgggcaagttgtttttgtttgtttgtttgtttgttgtttgtttgtttgtttttgtttttgaaatggagtcttgctgtgttgcccaggctggagtgcaatggtgcaatctcgattcactgcaacctctgcctcctgggttcaagcaattctcctgcctcagcttcccaagtagctgggattacaggtgccttccaccacaccaggctaatttttgtatttttagtagagacggggtttcaccatgttggccaggctggtctcgaactcccgacctcagatgatctgccctccttggcctcccaaagtcctgggattacaggcctgagccacctctcctggccgggcaaacttcttaacctctctgtctcatctatcacttgggaataataacatggccagtaaaatcagtgttgttctttgaacatattaataaagtagaaaaagttattttaagagcaataaaaatattaaacacaaaagaggatatttatagataaagtcaagattttaaaatgatattgtagggaggctgaggcaggagaatggcgtgaacccgggaggcagagcttgcagtgagccaagatcacaccactgcactccagcctgggcacacagcgagactccgtctcaaaaaaaaaaaaaaaaaaaaagtttgcctttaatctattttcttcatgtctaaacatgaaagctcaaggctgtggacaaatttgaagacatggagttttcttctcatgtagccctatcatttttttgttttgttttgttttaagacagagtcttgctctgttgcccaggctggagtgtagtggcgcgatctcggctccgcctcccagattctagtgattctcctgcctcagcctcctgagtagcttgggattaaagtcacccaccaccgtgcacggctaatttttgtatttttagtagagatggggtttcaccatattggccaggctggtctcgaactcctgaccttgtggtctgcccatctcagcctcccaaagtgctgggattacagcctcccaaagtgctgggattacaggcgtgagctaccatgcccaggcttttttttttttttttttttttttttttttgagacggagtcccgctctgtcacccaggctggagtgcagtggcaagatctgggctcactgcaaattctgtctcccagattctagcgattctcctgcctcagcctcctgagtagcttgggattaaagtcacccaccaccatgcacggctaatttttgtatttttaataaagatggggtttcaccatattggccaggctggtctcgaactcctgatcttgtgatctgcccacctcagcctcccaaagtgctgggattacaggcgacagctaccgtgcccaggctttttttttttttttttttttgagacggagtcccgctctgttgcccaggctggaatacagtggcaagatctgggctcactgcaaattctgcctcccaggtttaagtgattctcctgcctcggcctcctgagtagctgggattacaggcatacgccaccacgcccagccagtgtatatatttttagtagagaccgggtttcaccatgttgtccatgctggtctcgaactcttgacctcaagtgatccgcccacctcggtctcccagagtgctgggattataggcgtgagccaccgcgcctggtggccctatcattctttgttcactgtatgatctttagaagaaaggtgggcaacaggtggccagcagtggtctacctgtggtgattttattcttgatatcttctgacctttctatggccactatctgttccaccctcggaacagcacagagactttggtagagagaggctgtcccctcaccactggcagaatatggacgttcagacccttcaccttcctgacgtcagagctgacacattcaatacaacagctattggccatgtatggccggctactgggtgcctggaatgtcgctgcaatttgctagaaaggtaaaatacagagttagtttcaaagatacagttccaaatatatatatacttcattaatctttacatattgctcacatattacaatgataatattttggatatattgggttaattaaattgttacaatgaatttcacctgtttcttctccttctttttaaaatttttttatttttgagatggagtcttgctctgtttcccagactggagtgcaatggcgtgatcttggctcacctcaacctctgcctcctgggtttaagtgattctcctgcctcagcctctctattagctgggattacaggcacctgccatcatacccagataatttttgtatttttgtagagacggggtttcaccatgttggctaggctggtcttgcactcctgacctcgggtgatccgcctgcctcggcctccccaagtgctgagataacaggcatgggacactacacccggctttcttttctttcacttttattttctttcttctcttctcttcacttttctttcttctttttccttccttccttttccttccttccctctttccttctctctctctctctttcactctttctttctctctctctctttctctcttctttttttttcttgagatggagtttcactcttgttgaccaggctggagtgtgcagtggggcgatctcggctcactgcaacctctgcctccctccacctcccgggttcaagcgattattttgcctcagcctcccgagtagctgggataacaggcgcccaccaccacgcctggttattttttcttatttttagtagggacggggtttcatcatgttggccaggctggtctcaaactcctgacctcaggcgatccacccgcctcggcctcccaaagtgctgggattacaggcgtgagccactgcgcccggcccttctttatttttaaagtctggctactagaaaatttaaaattcacatgtggctcacatcttatttcataagattggctccttttaaaaatctcaggctgctagttcaaaggactaggagccaggaaggtcataaaagctgaaattttaaaataattatttttttaaatttgtgaatagccatatattatttataagtgcttatgaccttatacacaaggttaagggaaaataccctctaaggtgtgcctggctcagctcagggaggaagccctgcctgaaaaggctgcagcctaggctatcactctttcttcactccgcccagcatttggtcatatcttctgtcactcagggcctgaaggggcgggcccttaaaccgtatccaatcagacacgcagaactgggaaccgtccaattaggcacacatttggagcggcgaggacggcttccgggatgtggctgggccattgtttctctctgctgccggagctccaggtctacccttcactgctctgtgtcctcagcgtgtgtggcttcgtgacctgaagatactgggaaatccatagctaagatgccaggaccccctgaaagcctagacatggtgagagtgctgggtccgacatcacgagagaggggaaggagttgctcggaaccggtgggaagtggctgtggcgggactcaggcctccccgcagtcagctccacaatctgctccctgagttctccttgcccagctcggcctcagtctccttcagccgtaagttggcggctgcgccaacagccggggccccgggcgtcctgtctcttccctgcactgtgactgtgccctgcctggagtcctctctggcagttctgcacccgcagcgccgcgtctttctcagattgtgcggggaccacgggagggtcatcaggggagaatcctgacttggggtgcgggttcatgaatgggaagagctttggtccgtggggttcccagttgctattttctcctattaaaaatttatgggcgtcactgcaaaaatattaaagaatgtaatcaaagagtggttctagaattgtagagcacccagctatggtttgtagtttgtggtctgtgggagaggcttgaaggaaagtcttttataaaatgcatgatgaagaaaccaaatttactaattggttaggtacagttacatggtttcttaatatgtgcgttaaaggtgaaaatttcctggttatgtaatcagagcttaattggcagtttacagttgctgaagcctgaattttgtttctctgaatgtagtaattaaaaataatgcacctgagttagattttttttttaaagtaagaattcagggactagaaatacctcagtctaattgcctgccacttaattattttcacactccacagggaactgattttctgctgtatttttcacctgtgtcccaagcagagtcttggaaccaatcccccatttctccggcctcactctggcttgcagtaagataatttccagtttcctctgacgttcctaaatgccaccttttcctccctaattcacattatcgcctatttgtcttttactgtacttttttataccatattttaattatttttttggcaaagcattaaatggttaaatggtgcatttaaagagatttgttatctgtttgtaaatatttcccatgaaaagaaggcaaataataataccctgacactgcattgtagtaaatctctgtctcttttgctttcatcttgtctaggcacagagatgttaccagaatgtttttgggtcgaagttctcctttggaaaatctatggggtgatgtgtcctcagccaccctttggttttttcctggtcatgggtttcagtactatctggggataaaccaagataactgccatggttatgttagctagagtgtccattggatctcagcttctggtttattttctcccataagatgacctgaggtatggagtgtatcctctcaagggagcaagtggatattctggggctgaggggaatcttccggtgtactcttattttgaaacgggtaaccctttgaaatgttaaaattgccttccctcaaccaggcttccatttcttggagacaaattgctggtcagccaatcagatgctggtaatgaggggaaaacacagaaataatttctgccccctggattctctaagggggcagaaaaatagtgaaattaatatagtaaaagaaaaagagtaaaaaaaaaaaagtgaaaaatttgtggcccaaaaaatagtatcccaaaagacaaacaacaagaacaaaaacaaaactgactccagtgagatggtgtaagagcttgcaaagtaaaacgcaactgggacagtcaccaagaaatactgcagtgtctcctgaatgggtggttcttgagcacacaagtgagcaggagtgggtggaagaatctctcaagttattgaatggcctgacttgaaaggtgagtcagacacatctgttatttatttattttttattttttatttttttatttttatttttttgtctcactctgtcgcccaggctggagtgctgtggcccgatctcggctcgctgaaagctctccctcccgggttcccgccattctcctgcctcagcctcccaagtagctgggactacaggtgcctgacaccatgcccggctaattttttgtgtttttagtagagacagggttccactgtgttaggcaggctggtctcaatctcctgacctcataatccatccgcctcggcctcccaaagtgctgggattacaggtgtgagccaccatgcccggcccacatctgttatttaaccagcactgccactcctggatttgtcaccttgaagagatttgttcacttattttgacctcagttttttagctgtaaattgcattatattagtaggacttgaaaaggtagaaaaatatttacaaagggcataaaagatttgggtttcaaaaaattatatctaatcatatatgtcatttgttaaaaattctcatgtacctttttctttcccagagtgagtttttgaattttctcaggtgtgttttttttatagctgggtgatttcaaacagaatttcaaggcttagcttttagagtgctgccaagaaaaaggagagaaaaaatctccatttcatttttgctgtagaaaatgaatacatttccatgagaaaatgcggtaggtaattggtgagttacgtagattcataaaaacgtaagttcctttttttgcaaggtaaatttttgacagtgaatatctctgttcaaatcctgttatcttgatttgtgagtttcatgctaaatattatgagatgaaacttgatactgcctggaagtgttttcatatgactcattgttaactgcatgatttttagtggaattaatagaataagacatttattttctaaaagaaatagatacttttgcttttcttattaaggtatacaatataagcaacttggccgggcgcggtggctcatgcctgtaatcccagcactttgggagtctgaggcgagtagatcacaaggtcaagagatcaagaccatcctgaccaacatggtgaaaccctgcctctactaaaaatagaaaaattagctgggcatggtggcacgcacctgtagtcccagctacttgggaggctgaggcaggagaatggcttaaacctaagaggttgaggttgtagtgagccaagattgtaccactgtactctggcctggtgacagagagagactccatctcaaaaaaaaaaatgtaagcaccttaaaattttttttcccgtatgtgaacactgtgtttcagtaattttgctgaattttttaaatacttaatttcaaaaaccaagtgagtaactctaacgtgaaaattaaaggttgagcccagtgactcagagctaaggctaatactgagcctgcaaaaggagtttattaaaggcctagttagttttttttctggagagcctcccctgcagatgttccagcctgctcactccagccatggaagaagcctttctgctgacagaagctacagagtcctggaaagctacaggcagatgcagttaaggttaagataaaaggggacagggagggtcatactgaccatgtagttgttattgtacatcagggatgctatgatttagtatcctgaaactttgctgaagttgtttattagtttaaagagcttttctactgagactgtagggttttgaagatacagaatcctgtcatctgcacacaggaatagtttgacttcctctcttcctgtctgaatgccttttatttctctctcttccctgattgttctggccgagactttgaattctatgttgaacaagagttttgagaaaaagcattcttttcttgtgccagttttcatgaaggaatgcttccagcttgtgttcattttgtatgttggctgtaagtttgtcatacttagataactcagtattttgatgtatgtacctccaatgcctagttttttgaaagttttaaacatgaaggatggtaaatttcattgcaagcttttttaacatctactgaaataaccctgtggtttttgtctttagttctgtttacttgaggagtaacatttattaattgcatgttgaaccaaccttttatttcagagatacagccaagttgatcgtagtggattagctttttgatgttctcctggatttggttttccagtattttcttgaggatattttcatcaatgttcattaaaaatattggcctcaaggtttctatttttttgttttatatttgccaaattttcatattagaataatgctgtttttacataatgggttggaaagaagtccctttttctcagtattttgaaataatcttagtaggagtggtaccagctcttactttacatctggtagaattcagctgtaaatttgtgtggttctttgttttatttttggtgggcaggctatttatttatttatttattttattttattttattttttgagacagtctcactctgtcgcccaggctggagtgcagtggcacagtctcagctcactgcaacctccacctcctgagtttaagcaatgctctgcttcagccacctgagtagctggaattacaagtgtgcaccaccacacccagctaatttttgtatttttagtagagatggggtttcaccatgttggccaggctgttcgctgttcttgaacttctgacctcgtgatccactcgcctcggcctcccaaagtgctaggattacaggagtgagccaccatgcccggtcagctatttatttatctacttatttatttatttcattttatttatttatttatttttgagatggagtctcgctctgtcacccaggctggagtgcagtggcacgatctcggctcactgcaacctccacctcatgggttcatgccattctcctgcctcagcctcccgagtagctgggactacaggcacccgccatcacgaccggctaattttttgtatttttagtagagatggggtttcgctgtgttagccaggctggtctcgatctcctgaccttgtgatccacctgccttggcctcccaaagtgctggggttacaggcatgagccaccatgcctggccctggccagctatttattactaattcaattttggagcttgttactggtctattcagggattcaatttcttatttgttcagtctttgcaggatgtatcattgttccaaggttataatcctcaagcttggccctgacgaactctctaattatattcatgtttcctcagttttttccttttaggtagacatattaatagaatgggctagaggagcctctatgaagggatctctcctttgattgtactctgcttgctgtaacacccaagaatgcagagtcaggctaaccccacttagaatctgcacatagggtcaggcctctgcctgggatttacaagacagggccagactttcaattgtgaatgtaatgaaaaccaacaaaatgcattttctgcattgtgagatgtcaacatagacatcttaaagcccccctttgagagtgtggctttttaagcttttcagatcttgtttagtgacctgctacagttatatgagaggctccaggtataaatagaatctgatgacagaatctataagtgtaaacaagcatcttaagagtgagggataaggccacaaagtatccagagctatgaccacaactatacctacctgtaaattgtaataatggagtagagtattcttgtccttcttacccaaaagctagcacatcaggataggtgatccaggttctggagttccaccaaagcagttccattttctatttagaatcagcatgaatctctctcagcctggcttatcactgggccatcagccttgagtcactgagaaccgtctcacaatcacctaggtgtctttaagacatttgaggatgtcagggacagaattgtgtcgggattacatggccaatttgcagaaatctctttacttgtgctctctccacaggttctgtgtattgttctaggtgaaagtattcatgttttaattgtgtctcatgtgactcttaaggtgaggacagaattaagtgtgtggggttcaagatagattcatgagagttaagtttcacctttgcactaaaaggtggtcacaggaactgttccgtttggttttgataggaagaggtcagtgtcacccatattttcattactatagcagaaattgctggtgtttgtggcaagggcaggcacatgaagacaaatagagaaacatatttttatattcattgagcagctcattgttcctgaatctctcctgttataaaggacaaaagtgagtgggctttttctgcagttcttctttttttctgtggttgtgaggctagcaggtaaataggtggtgctgacttctttacaagaattttctcaggatgcaggtgtaacttctccagagaatgtcatctgaaaaggatttccaaagaaggcaaaagaggaaaaatggctttttttttcagctaaatatgtctcagatgaagagctgtgtccactctgcctcctggattgccatgcgtttagtccttgcaaacctttacttccctacttgtgtttctttcccctaatgagtttgttttaactactttagaaaattcttgtgatagtcaagggtctctgcaaaatatctctctcctatatcccagaaccttctctacactctctaaatcatggcttcttatacgccatgcagaattcttaaaatgaatttataatctgcactacttaaaatgttccctttgttgccattgaacgtgggaaaatgtagatattcaagattcccattggcggaaagctggggtccttagtaaagataaataacatgtaatgttgtggtttcatctgttttctccattaattctatgcagaacaggattaataaaatgcttatttaaacaggatggtgtttattaccctgaaagttctgaaaaaaagttattgagagatacctgctctctcaggtgctaaagaaagactactttaaaatgttattaaaaattgcagaacatagaagatatctgcattttgaactctgcataaaactgatttttctgtatggttaacctcagactataatttactttttgaggggcaatatctcagcagtgatgatgtcttcttctgtgtgcatcagcacatcataaacatttgtcctaatgcagttgattttaaaatttacttaaaagagctctctgaaatatttatttcactatagagttaattatttttctcttcattattaagtatctttatgtagctaaggaagagctgtgcataaaccatcacatttaatctggcagctgcctttctttgttaggttttccttgcatttatctgtctttggaaaatgaagactcttatctttgtttacagggcagaaaaattgagtaaaacacaggatcttccacttactggatattgacaaaatattctttctgggccaaacacattggcattactagtgaacttgttagaaattcagaaactcagagtttatttcagatcttctgggaaaaaagaatctgcacaagatctccagtttactgttcacattaaaacttgagaggtgccttctaactcaacatatcttttgtctgaaaaatatacacaactcattctttgtgtggcaaatatagcactaaaaaatgtacatgtttgtgtttatgcctttagctttatactttactattaataaaagtatatatacagtggtgttgtagatcttataccattctcttctctcagagttagagaatacattagagaatatttctgtgttgaaaattgttggataatttcagtcattcctgtaagtcagaacgaattttctttactttctcatttgaccttaattcaaatgataaattttgcccacgtgtaaatgtgtgtgtgtgtgtgtgtgtttgtgtgtgtttgtttcaggggccgttgacatttagggatgtggccatagaattctctctggaggagtggcaatgcctggacactgctcagcaggatttgtataggaaagtgatgttagagaactacagaaacctggtcttcttgggtgagaataactttaatacaaaatcccttatataccctaaagttttcatttctctgttttcatagaataatttttggtaatttatgctttgcataagtgagtttctggtgcctgttttaaagaaatcttgaagaactgtccgtgtggaaaaaaatttcttcaggatgttttatcttggcctgatctttttacatttctgagccggtctgtatccttcactctacagtagtggtaatttcagaaatttagtagtataaaatattgttgtccatatgttaaaatctatatgccaccactaattttttatccatgaatactgggtggcaaaattaagcacctacaaatttaaaatattttctaaatgttaagaactttctgtcattaaatagtattttgggataaattttctagaatattctattacatcctctttactaagcatggtactaggtaggtaattagagaatatgagcaagattcatgttatttatttttaataaagcaggtattgctgtctctaagccagatctggtcacctgtctggagcaaggaaaagatccctggaatatgaagggacacagtacggtagtcaaacccccaggtaggtgagagtgaatgaaacagttgacatagatgaaaggttgaaagatttaaaaaaaaaaaaaaaaaaaaaagccagtcctggccgggagcaatggctcatgcctgtagtcccaggactttgggaggccaaggcaggtggatcacctgagctcaggagttcgagaccagactggccaacatggtgtaaactctgtctctactaaaaatacaaaaattagccaggcgtggtggcagttgcctgtaatctcagctcctccggaggctgaggcaggagaattgcttgaaaccgggaggcagaggttgcaatgagccaagatggtgccactgcactccagcctgggggacaagagtgagacttcatctcaaaaaaaaaaggaaaagaaaatagttatcaagtgaatataataccatcaccaaatctgtcctgctgatttgggaagctatgttccaaagcaaagagtttctcggaagcctttggcatttttttgttttttttttgttgttctttttctcacatagggccatcttctgtcttatgcttttaaattctctaaggattctactttctcttcattgatactcctttaagtttacagtgagagccaaatcatcttcatggcatataagagactgcacaatctgactgcttttccattgttttgggggacacacaaatatctgcatctgcatgattttgagaaactttatgttaaactattttattagttctttttttgcatcatttctaaaatgtatgagggtagtggtctctgttctattggtttttatgttaattttctgaacattccatcctgtttttattagtatattcttgaaatatagtttgaaattataaagtatgatgtccctctgctttgtttttttttctcataattaatttggctattcgaagtttattgtagttttttgtaaattttaaaatcgtagttttcattactataagaaaaaaatgccactggaattttgataggtcgtttgctgaatctatagattactttggagaatatggtactttaacagtatttattttttcaatccataaatatgaaatatttgtaaatttatttgtgtcttgcctaattccttttattgatttatatcttttattgttaacattttttgcctcgggttaaatttgttcttagaaatttattattttaattatatttttaaaaagattgctttcttggctgcacggtggctggggcctgtaatcccagcactttgggaggctgaggccggtggatcacttgagttcaggagttcgagactagtctcgccattatggtgaaaccccgtctctactgaaaatacaaataattagttgggtgtggctgtgggcacttgtaatcccagctactcaggaggctgaaccaggggaatcactattattaatcttaaaaaattattattattattttttttttgagatggagtctcactctatcgcccaggcaggagtgcagtggtgccatctctgctcactgcaagctccacctcccgggttcttgccattcacctgcattagcctcccgagtagctgggactacaggcacctgccaccatgcctggctaatttttttgtattttcagtagagacggggtttcaccgttttagccaggatggtctctatctcctgacctcgtgatccgcccgcctcagtctcccaaagtgctggtattacaggcgtgagccaccatgcccagcctaataaaaatttttttatttctattgtatccaatagcttgttttaagtgtgtagaacaataacttacacttttatgttaattttatattttgttaatttactgactgtattattagtttagacaaatttcaatgtactgtggttttttatgtgtaagattatatgttcctcaaacagcaactttttacttatttgtcttcagtttcaatggctttaaaaagaattcttttttcattattctgccacatgcttccagtgctatgttaaaatagaaacattgacaaagggcacaatagagtttactattggtgtctgtgaatttgaaatggcaaacaactccttaagtttttataagctgatttcaggaggtaaagatcttcttttcttgtgttccccagggttttgggatgccctctgggtttgtagtggagtggggttgtaacttggttgcaaggctgctggttctacattagggtccatatttagttgtcatgttacaagaggcttgggtagttgtacttcccaatttttttttttttttttttttttttttttgagacaggagtctcgctctgtcgcctggctggagtgcagtggtgtgatctcagctcatcaaaacttttgcctccctagttcaagcgattctcctacctcagcctcctgagtagctgggattacaggtgcccaccagcacgcccagctaattttttgtgtgtttttagtggagacggggtttcaccatgttggctaagctgggtctcgaactcctgacctcaggtgatccacccgccttggcctcctgggtgctgggattacagacgtgagccaccacccccggccacttgtttcttttaaatgcttattaaaagtttctcatcagaatattttatttataattatactgcatattctctgaaattttactgccaatttttcaaaatacctgcttttgatgagtacagttacagtcaaatactgtagttagacaaattcttttttaatggtatattaatgttgcataccaaattgtatgagttaaacgtctcttcctgtgcagtttcatattagtggtgttttcagtgtaggtatcttaatatcagcttatcgtggtttttggttatgtattataattttagtcaatttgcaattctgtctgtatactttatgtcaatgtgaggttgaattaaaagatagccatatgtctatcacaatcatatatgtgtgtgtgtttatctataaatatgaccccaatattggttatggcttatcttgtatatattctttctttctttctttttttttttttttttttaaggtggagtctcgctctgtcgcccaggctggagtgtgcagtggaacaatctcggctcactgcaacctcctcctcccgggttcacgtcattctcctgcctcagcctcccaagtagctgggactacaggcgcctgcaaccacgcctggctaattttttgtatttttagcagagacggggtttcaccatattagccaggatggtctcgatctcctgacctcgtgatctgcctgcctcagcctcccaaagtgctgggatcagagatgtgagccactgcaccctgcctcttgtatatattctttcttagctggttttcagtggttgttttatcttgtctaaatgtgtagtcatgtaaatattttcaccatttcttattttcatgatgtgtttaatcatgaatatatattccctttgtgtaagagaaacacttctgggatttgaaggtaatttttgaaaagatttataattctttatttttttcagtttttctgttagaaaattaattgttgtaaaaacacataaaatttagcatcttaaatctatttaagtgtacatttcatggcccaacatgtgggtggctcacatctgtaatttcagaaatttgggagtccaaaacaggaagatcacttgagcccaaaagtgtcagaccagcctgggcaacatatgaagagtctctctttacaaaaattttttaaaaatagccaggcgtggtggtatgcacctgtggttccagctacttgggagattgagaggggaggattacttgagcctggaagtttgaggctgaagtgacccttaattgtgccacttcatgtcagcttgggtgacagagtgagaccctgtctcaaaaagaagctgtatatttcaggcatgttaagtatattcacattgttatgcaaaagacttctaaaagttttacatcttgtgaaactaaaacccagtacccattaagtaacaacaacgcatttaccctcttcccagcccttggcaaacacccttccaatttctgtttttataagtgtgactacttaagatatataagcggaatcatacagtattcatcattttgtttctggcatataggtgacataatatttgcaaagtttatcttaaaatgtgacaatattttcttctttaagactgaataatatttcattgtgtgtatatatatatatatatatatatatatatatgcaacacttttgatgtgtttataaatcaagagacatctgagttgtttcagccctttggcttttgtgaatacgggtacaataaacatggatgttctaataggtcttccaggtcttctgttgcatattttgactataaattcataaatgggattgctgtatttgatgataattccatttttaattatttgagaaacataacattttaaaataatgattgtatctttgttttctactaacaatcaacataggtttcatttttattgcatcatcaacatatttggtgtgcttaaaattttatagtggccattgtaatgggtgtgaggcaattttttcattgttattttcgtgtgtttctctacaaagtattaattttctgtgtcatttcaaatgctctttttctatatgtgtatcttttctgatgaaaattttgttcaattatttgctcatctataaattaatttagctttattgttcagttttaagagttcatatgttatgaatattaactactatcacatatgatttttgaattttcttaatgtgcggaaattttcaagtatagtgtagttacatttttctgtttttttctttgttgttcatgcatttaatatcatatctaagaaaatggtgccaagactcatattatttcttttttctaagagatttattactttttcatgtctaagtttttttgtttttgtttttgtttttgttttttgagatggagtttcactcttgttgcctaggctggagtgcaatgggatgatgttgggtcacggcaacttctgtcttccaagttcaagcagttctcctccctcagcctcccaagtagctgggattacaggcatgcatcaccatacccagctaattttgtattttttgtagagacggtttctccatgttggtcaggctggtctggaactcctgacctcaggtgatccacctgccttggcctcccaaagtgctaggattacagacatgagccaccacccctggcctcatgtctacggaatttttttgtaaattttgtgaatatagtttttaaaaatgatgtaactgtatttcatcagtgttgatgtttttaacattattttttgagaaaattatcttttctgtatcgtgtgctcatggcaactttgcaaaagatcatgtaatcatatacagaaggcttcatttctgggctctctgttctgttctttcatctttttatctttgtgtaagtatcacactttttgttattgtagcttttaatgtgttttgaaatcagaaagtataatgtctctctgttcttttttatgagtgttttgctagttatagtttataatcaaattataaaatgttaagcaggttgggtgcgctgtctcacacctgtaatcccaacagtttgggaggctgaggcgagcagattgcctgagctcaggagtttgcaaccagcctgggcaacaaagtgaaaccccgtctctactaaaatacaaaaaattagcagggtgtggtggcgtgcgcctgtagtcccagctacttgggaggctgaggtgggagaattgcttgaacccaggaggcagaggttgcagtgagctgagatccctccactgcactccagcctgggtgacagagtgagactccatctcaaaaaaaaaaaaagttaatgtttttgcaataaaactgtgctattgtaattttttttttttttgagatggagttttgctctttcacccaagcaagagtacagtggctgaatctcagcttactgtatcctctgccttttggtttcaggcaattctcctccctcaatctcacattgcattaaatctgtagattacattgagcattatggacatcttcaaaatatttcaaattttgaacaggagcatgctgaagagtgtgttgtttaatttctatgtatttgtacattttttttctctatcttatactgccgagaccagctcagtcggggagaccctaacccaacggtgctagaggaattaaagacacacacacacagaaatatagaggtgtgaagtgggaaatcagaaaaggtttggagctgagagccccaaacagagatttacccacatatttattaacagcaagccagtcattagcattgtttctataaaagattaactaaaagtatcccttatgggaaatggagggatgggccaaaataaagggatgggttgggctagttatctgcagcaggagcatgtccttaaggcacagatggctcctgctattgtttatggtttaagaatgcctttaagtggtcttccaccctgggtgggccaggtattccttgccctcattccggtaaaccgacagccttccagcatgggtgttatggccatcatgaacatgtcacagtgctgcagagatttagtttatggccagttttggggccagtttatggccagattttggggggcctgttcccaacatgtctcttctttgatttgcaaatcaataaaggcaaaggcagctttgtcacggtgagctacttctcgcaggagtcaggatccacatctgcagactatcagcacagattaaaagcacaatcatctttgaaatcacagaacttccaagtgtttttatccattttaatgggttactagctgctaatctgtctgcagctccattaagcactccagttcttggcattaacatcaggtgtgcttgggatgctttaaatattttaattttgcaatatccaaaaacaactttgtagagtgtctttctagatgcttttttattctttcccaaattttgatcttattaagaactattaatagtgtccacaaatccttgtgtttagctcctacagcaggccttatcatttgaggtcgaggtgccactatactgccatggttccagataatagaactcttgccatacttcttatcatttctatcatctgaccattttgttcagatcagctgaacacagtgtggctgtggcacacagactgagaggtgcaatttaagctaaacatccccttaggagaccagctaataatgattccatgggaatcattgtgcagcacctctgcctgttctgcaatgcaatctttctaaagaagtacattcattttttctggccaggtactattttgtttacaaataggtttttgagggcggtatgcctcaattataggagcagatttattatggtaaatactgagataagaaagcatgtgtaactgtgtcatagagtgattacatccaggcattattaccagccaagatagataaatatgcccaataagtataattgttctctgtgtcagcccttgttgaaggaatactcatggcaatggtgataactgctatcatagctaccattaaattgctcattgtgactggttgtcccactttcttcaggttttcttccgccatctgtgacagcttcttgatctgtcccaaggtgggtggctgtgttcgacgtgtgttgcttgtgacgcttggggttgtcctcagcatcaatcttgacatggctgcaacgagggggtcctcgggatcctcccagaatctcttcctcagcatctggctcatgataaagtttcaggtatcttgatggtatccaaatcagctgttgattttggcctggaggaacacaagcataatctctaccccaagttattttacccatttgccaactttttgttattggatctctccaccaaatcagttgttctgcttctctctttgcagctggtttctgtacatgctgttcagctgctgataacatctggcctttgggcaggctcaaaaaatttaaagttaataatgctagattcaggagcatctgtggggttacatattgtctatttccccccgtctccttctgcaactgctgttttagggagagattcattctttccactatggcttgtccttgagaattgtatgggataccggtaatgtgtttaatattccacacagagaaaaatgtagctagagcttggctagtatagcctggggcattatctgttttaatagaagctggaatgcccaccaccacaaaacactgcaaaaggtgatgtttaactaacacaggcagaagactctcctgattggcatgtagcccagacaaagtaagaaaaggtgtccacacatacatgtatataagctagtctcccaaatgagggaacatgtgtgacatccatttgccaaatagagttaggttccaatcctcgaggattaacccctcctgtaaaagatgaggaatgtaccatttggcaagttgggcattgctggataatagctttagcttctttccaggtaatgctgtatctgcatttgagactagaggcattaacatgggttaaattgtgaaagtgtctagcattagatattgcgttagcaactaggcaatcggccatttgattcccttcagtcaaaggtcctggaagaggtgtatgagcgagccctaatgtgagtgatgtaaaaaggatgcattgtactcctaactgctatttgcaattgggtaaataaagtgatcagttgttcatctgtatgaaatcgtaactgagcattttcaataaactgtgtggaatgaaccacgtgtgaagaatcagaaatcacattaataggcatatcaaaagcagtcaatacctcaattgcagctacaagttctgctttttgagctgaagtatagggcgtctggaaaactttacttttccagccagaataagaagctttaccattactaaacccatctgtaaaaacatactcagcaccttcaattggtttacatttagttattttagggagaatccaattagttaatttcaaaaactgaaacagttttgttttaggaaaatgattatcgagaatgcccacaaagtcatctaaatgggtttgccaagtaagactatttataaaagcttgctgtatttgtaccttcgtgagagagacaataacttttccaggatcatatctgtgtaatttaacaatccgagttctcccaatccctatcacagtagcgatttgatttaaataaggagttagagtccatgaattagtatgtggaagaaaaagccactctactaagtcctgttcttggacaataacaccagtaggtgaatgctgagttgaaaaaattagcaaatctagagtcttctctgggtctattctatttatttgagctttatggacttgcttctcaattagttgtaactctccctcagcctcctttgttaattgctgagggctagtgagactaggatttcctctaaggatagaaaacagattactcatggcataggtaggaatgcctagagcagattgtatccaattaatgccccctagtaatttttgaaagtcatttaatgttttcaattgatccctacatattgttcctttctgtggcacaatggtagtgtcatttactagggtccccaagtaggagtagggagtagtagtctgaattttgtcaggagccataagtaaaccagtgcaagaaatcaaattttgcaagggatcataacattggagtaatatttctcaagtggcggcagcacaaagtatatcaaccatataatgaataatgtaacactgtgaaaatattttatgagtaggtcaattacttgccctacatatgtatggcaaattgttggactgtttaacatgccttgtggcaacattttccaatgaaaacgcttagcaggctgctaagcgttgttgtttactgcaggaattgtaaatgcaaaccattcacagtcttgctcagataaagggatagtaaagaaacagtcttttaaatctatgactattaaaggccaattttttggaattatagcaggagaaggcaatcctggttgtaatgctcccataggttgtataactgaattgatggctcttaagtcagttaacattctccatttacctgattttttcttaattatgaaaactggagaattccaagaggaaaatgttggagctatgtgcccattttctaattgttcagtaactaatttctctaaagcctccagtttctctttatttagcagccattgttctatccaaattggcttatctgttaaccattttaaaggtataggttctggaggcttaacaatggctgccatcaaaaatgatatcctaatctttggcgggaactctgtttttccgctggaagtggttttttcaaaccttgcacattttttttctagtaccataccagggacataccccatttcatgcattgtatgttctttgagggctatataattgttctggaattagaacttgtgctccccattgttgtaataaatctcttccccataaatttataggtacagaagttataattggttgaatagtcccaggttgtccatcgggcccttcacaatgtaaaatataactacttcgatatacttcaggggctttaccaactccaactatattaaattgagtgggttgaattggtcacgcggatggccaatgctgtagagaaaagattgaaatgttgactcctgtatctaccaaacctttaaatttctttccctgaatagttatgtcacaggtaggacgtttactagtgatttgatttacccaataagctactttgccttgtttatttgtgcttccaaatcctcctgttcgtttaatttcactttttcccattcccacttatggcacaatcaggagctgtgctatgcgctctcctggctctgctttccagggaacagaagtagatataacaatttgaatttccccattgtagtcttgaatcagtgactcctgtatatatttgtaccccttttaaacttaaactagaacttcctagagctaactcctattgtccctgctggcaagggtccacagactgctgttgggaactttagcgggggttcccaaggcagaaggctcacaggttttgcagcataagtctactgtggcactaccagctgtggcgggggacagacattgtacaggggtgagggaatggcctgagctggaaatgccccagtttagaacggggcctgagacaggcccctcatggcatttcccaaaatcaggttcccatctttatcaaacagagtggcactgattagcccaatgttttccttttttacattttggacatatttcagactcagtagttttcttttttcccctatctggtggcctgacttgctgattttttctacattcttttttagtatgaccatgcttcccacagttaaaacaagctccaggaaatggagtatttcctttatccactctcagtcttgtcgttgcctgtgctagcagagtagccttacgcagattacctccaataccatcaaaggcctggatataatcaactaaatgtgctttccctctgataggtcacacagcagcctggcaatcgggattagcattgttgaaagctagtaactgcaacactatatcctgagcagccgaatctgtaatcacctttttaagagactcctgtaaccaagctgtaaaatccatatacggttcttttggtccctgttttatagcactaaaggaagggtattattctccacatgaagtggtcttttcccaagctgtaatacacactcctgtaagctattctgtggcatcatcctgcatgaccagttgtgcatctaaaccagcccagccgccaacccccaaaagttggtctgagttatattaatttgaggatgggcctgggtattgcgagcagcctgaatggaagcttcatctgcccaccaagttttaaattgtaagaactgggcaggagttagacaagctcaagtaagagcatcccagttagtaggaatcatcagactggaaacggcaacattctttaagagtcttattacaaaaggagaacctagtccatactgattaatagcttgtttaaattctttgagtaatttaaaaggaaaaggctcaaatgtagctataatatttcaccattgatctggggagtgtattctaacaaggaactgccaagcctctatatcactctctcgtctagcttgctgaattcctgcctgaatggaactaagagcagttgctcgaggcactgctcgaacagtcactggggcaactacttttcacccagtgtcctctggaaaagaaagatctggagggtcaggccactctttttcttcaaaataataatgagggggtgtagaagggtagggatgaacctctccctcctgtgcctctttagctttcactggcaaataaacctgatatgtaacctcttctgttacttcattacactctccttcctcctcattatcagtgtgaaaaagttccaaggtggaatgaaccacagcacacacttgtcccattgttaccctgatgcttccaagctccccttcttactcatcatggggattgctttaagagtacttgggtgtcctccggcttagttctacattctccaaccatcactccactgaccttcaacctggattcgagcccccatgatggacgccacttgctgagaccacctcggtcagggagaccctaacccagcggcactagaggaattaaagacacacacacagaaatatagaggtgtgaagtgggaaatcaggggcctcagccttcagagctgagatccctgaacagagatttacccacgtatttattaacagcaagccagtcattagcactgtttctagagatattagattaactgaaagtatcccttatgggaaacgaagggatgagccaaaataaagggatgggttgggctagttatctgcagcaggagcatgcttttttttgtggtttaagaatgcctttatgcagttttccttcctgggtgggccaggtgttccttgccctcattctggtaaacccacaacctcccagcgtgggcgttatggccatcatgaacatgttacagtgctgcagagattttctttatggccagttttggggccactttttggccagattttggggggcctgttcccaacatgtaagctcagtgctttgctgagttctctgagtaatctttcaaattattcaaattattgaacttgaggaggaagatgtggaagaccttggcttgttagcagtagttcagaaatagatggttatccagagccatgtgactggcatctgtagttgcgacagtgttgtgggactgagccctgaacttgtggattctgtgttgactctgggtggtgtcagaattgagttgttggacagccagttggtgttggataattgattggtgttcagcaaactacaactttttttgtcagacgagatctaccacaggggccttgtattagggttctctagagggacaaaactaataggatagatatatatgtataaaggggagtttatttagttttaactcacatgatcacaaggtcccacaacaggccgtctgcaagctgaggagcaaagagagtcagtctgagtcccaaaactgaagaacttggagtctgatgtttgagggaaggaagaatccagcacgggagaaagatgaaggctaggccaatgtaaccttttcacattttcctgcctgcttttgtatgctggttgtgctggcagctgactagatggtgcccacccagattaagggtgggtctgccttttccagcccactgactcaaatgttaatctcccttggcaacactcaaagatacacccaggatcaatactttgcatccttcaatcaagttgacagtattaaccatcataggcctgggctggagggagacttcagatgtctgagggaagtgagggtttattctgcacacaggctgtcacattgtacattgtcctgctattctgggtctcctagggtgagagggaagagagagtaaaaatgttctgagaacttattccctctccccactttggtgccaacccccacatgattctgacccactcttgaccatacccactaaaaattgacacggccactcctctcccaggacaaggttttaccctcaggaattatgcccacaatagctttgcccctagagttttctgccaagaatatacacaggtgcctagaagacttctggcttatctcaaccccagacactgaatctgtagcaggaacctgtctccttcaccaacacaggcttctggacctcctgattataatctcttctgcctgtacagacacaaagttttctgaaacaaagagatttactaatgttaatttattgttctatttgattcttgtatctttgtcccacattttctgtctctttgtgtcttctttatttttattttatatgcttttacttcttccttattttgttttgtgtatctatatagatgtattctttgtgctaagaaatttatttttgtgtatgtgcatatctttcccagaaaataatgtattttaatatgattatatgttgttttgttgagtcttgttatttacattggaagcaactgccttcagcgccttttatatataaggcagtgccaatatacttctttagaattcatttatttttgaagtttttttttctttttatttagcaggacagattttgtgatggtattatactcacttgattatatatatatatatatatatatatatatatattttttttttttttttttttttttttttttttcagaactttgactatatcacacaatatccttctggcctgcaaaatttttcttgagaatccacttgctatctcataagagtattcttgcaaataacactttttttttttttttttgagacgaagttttgctattgttgcccaggctaagtgcaatggtgtgatctcagctcactgcaacccctgcctcctttgttcaggcaattctcctgcctcagccccccgagtggctgggattacaggcaggcaccatcacacagcaaagtttgtatttttagtagagatgggttcccccatgttggtcaggctggtcttgaactcccgacctcaggttgttggcatgccttggcctcccaaagtgctgggattacaggcatgagctgctgcacccagccaacacatcacttttatgttgcagctcccaagattcccttttctgtgacttttacaattttgcttacatatgtgtttgatataaatatctttgcttgtatcctagtttgtttgttgagcttttttatttttacatcatttttcaagatttttcagggtttttttatatttttttacctccctaatttgtttactaatgttttaaatatttttgttcttatttccagttttctgattttctgtagttctctgtgttcatatttcactcattgagtgttactgaatttatttcattttttattgtttcttcctcaaatttttattttattttatttttgagatagagttttgcacttgttgcccaggctggggtgcaatggcatgatctccacccaccacaacttccacctcccaggttcaagcaattctcctgcctcagactcccaagtagatgggattacaggtgcctgccaccatgccagactaattttgtatttttagtagagacagggtttctccatgttgatcaggctggtgtcaaactcgtgacctcaggtgatccacccacctcagcctcccaaagtgtgggattacaggtgtgagctactgcacctggccacattgtaatcttttataaaaatttgaacattaaaaagttacctgtcacaatctttgtaatatggctttctcctggcatactttgaacaattgtctgagttagagattctgagagtctctcaaacatgttctttgagtgtgtcttgtctgaaattttgtgtttattttttagttaaaggaaattattcatctttttttttggagatggagtctcagtctgtcatgaggcaggagtgcagtggcacgatctcagttcactgcaacctccgcctcccagattcaagcaattctcctgccacagcctcctgaatagctaggactacagataagtgccaccatgcccagctaagttttgtattttcagtagagatggggtttcaccattttggccagcatagtcttaatctcttgaactcgtgatccacccgcctaggcctcgcaaagtgctgggattatgtgcatgagccactgcacctggcccctagtcatcttttttcttaatactcagtaatcacttgctacacctgttttctttctgtggcactgcagtctctctactgctgtaacatttacctttggtctcagcagactcaaactgtcattccaaagtataccaccatttctttctgcactatatatcatagaagacagaagccagtgtgtggaaaggcctggacaagcaagtaataaagaaatttgagccagtattttactagtctttttttttttttaacaaaatcaaaagttggcaagttacttctttatttatttatttatttatttatttatttatttatttttataattttttttttttgagatgtattctcactctgttccccaggctgtagtgcaatggtgcaatcttggttcactggtaccttagcctcccaagtagctgaggttacagcttgagccactgcacttggctgggaatttacttctaaaggcattatgttatattgggaagcaggaatagccatgttgggtaaatgtaacaaacatttgcttttcccttctgtgtgactttgtgctcacctggggtacttcaaacacttaactcatttataattttttctcagatatattttggttagtatgttttcattacatataaagaattagagcctttggtattttgctatgctatctggtttatgcagtttgtataatattatagtttagatttgtaatctatatttatctgagtctagtaagtggagtaatttgatatttttatttctttcagttatatgttctcattttgctgaagacttttgcccagggccaggcattaaagattcttttcaaaaagtgatactgagagaatatgtaaaatgtggacataaggatttacagttaagaaaaggatgtaaaagtatgaatgagtgtaatgtgcacaaagaaggttataatgaactaaaccagtatttgacaactacccagagcaaaatatttcaatgtgataaatatgtgaaagtctttcataaacttttaaattcaaatagacataacacaaaacatactggaaagaaacctttcaaatgtaaaaaatgtggcaaatcattttgcatgcttttacacctatgtcagcataaaagaattcatattagagagaattcttaccgatgtgaagaatgtggcaaagcctttatctggttttcaacccttactagacacaggagagttcatactggagagaaatcctacaaatatgaatgtggcaaatcttttaaccaggactcaaaccttactacacataagagaattcatactggacagaaaccctacaaatgtgaagaatgtggcacatctttctaccaattctcataccttactaggcataagctaattcatactagagagaaaccctataaatgtgaacaatatggcaaaacttttaaccaatcttcaacccttactggacataagataattcataatggagaaaaaccctataaatgtgaagaatgtggcaaagcctttagtattttctcaacccctactaaacataagataattcacactgaagagaaatcccacagatgtgaagaatattgcaaagcttataaggagtcctcacaccttactacacataaaagaattcatactggagagaaaccctacaaatgtgaagaatgtggcaaagcctttagtattttctcaacccttactaaacataagataattcacactgaagagaaatcccacagatgtgaagaatgtggcaaagcttataaggagtcttcacaccttactacacataaaagaattcatactggagagaaaccctacaaatgtgaagaatgtggcaaaacctttagtgtattctcaattcttactaaacataaaataattcatacagaagagaaaccctacaaatgtgaagaatgtggcaaagcttttaaacgatcttcaacccttactaaacataggataattcatactgaagagaaaccctacaaatgtgaagaatgtggcaaagcttttaaccaatcttcaacccttagtatacataaaataattcatactggagaaaaaccctacaaatgtgaagaatgtggcaaagcttttaaacgatcttcaacccttactatacataaaatgattcacactggagaaaaaccctacaaatgtgaagaatgtggcaaagcttttaatcggtcctcacaccttactacacataagagaattcatactggacacaaaccctacaaatgtaaagaatgtggcaaatcctttagtgtattctcaacccttactaaacacaagataattcatactgataagaaaccctacaaatgtgaagaatgtggcaaagcttttaaccgatcttcaatccttagtatacataagaaaattcatactggagaaaaaccctacaaatgtgaagaatgtggcaaagcttttaagcggtcctcacacctcgctgggcacaagcaaattcatagtgtacaaaaaccctacaaatgtgaagaatgtggcaaagcctttagtatattctcaacccttactaaacataagataattcatactgaagagaaaccctacaaatgtgaaaaatgtggcaaaactttctaccgattctcaaaccttaatacgcataagataattcatactggagagaaaccttgcaaatgtgaagaatgtggcaaagcttttaaccattcctcaaaccttattaaacataagctaattcatactggagacaaaccctacaaatgtgaagcatgtggcaaagcttttaggcggtcttcacatcttagtagacataagataattcatattggaattcatactgaagagactgtacaaaagtgaagaatgtggcaaaggcctttactgctcctattcccttactaaagaatgtggcaaagcttttcaccagtactttacccttaatacacataagataattaatgctggagagaaaccctacaaatgtgaagaatgtggcaaagatttctattgattctcataccttactaaatataagataattcatattggagagaaattctacagatgtgaagaatgtggcaaaggctttaattagttctcatcccttactaaacataagagaattcataccatagagaaatcctacaaatatgaagaatgtgacaaagcttttaaccacttctcaaccctgcctacacgtaagataattcatactggaaggaaaccctacaaatatgaggaatgtctcaaagctttttactgattcttataccttactaaacataaaataattcataaaggagataaattatacaaatgtgaagaatgtggcaaagcttttaacaaatcctcatccattagtaaacataagataattcatactggagagaaaacctacaaatgtgaggaatgtggcaaagcctttagcctgtccctccaatttactgcacataagataatttatactggagagaagccctacaaatgtgaaaaatgtggcaaaccttttaaccaatcctcaacccttactacacattagataattcatgctggagagaaaccctacaaatgtgaaaaatgtggcaaagcttttaaccaattttcaaaccttactaaacataagataactcatactggagaaaaatcttacaaatgtgaagaatgtggcaaagcctttatccagtcctcaactcctagtaaacataattaatgatggagagaaaccatacaactgtgaagaatgtggcaaagcttttaaccagtcctcaaactttattgaacaaaataattcatacaggagagaaaccctacaaatgtgaagaatgtgacaaagcctttaaccagtcctcaatttttactaaacataagaaaattcatactggagagaaaccctatgattgtgaaaaatatggcaaaggctttaactagtcctcagttcttaacacacatacgataattcttactgcagagaaactctacaaaccagtaagatgtgacagtgcttctgacaacatctcaaacttttctaatcataaaagaaatcatattggtgagaaatcctagaaatgtggagaatgtaacaaagtatttaaatggttgtcacacttgattataggtaatattcatattggaaaaatttcctacaagtaagaacaatgtggcaaagtttttaactaatacaccttattgcacagaaaatcatttatatttgagaaaaattgtagaaatatagactgtgaaaaagacgtcaatatctgctcacatcttactaaacaccagagagttcatgcttaataaaagcatgataagtgcaattactgccaaaagatctttcagaaaatattatcctttaaagtgaaggagagtatttatattaaagatgaacattacaaccataaagagggttgaagtacctttacttgtatcagatcttattgtccacattttgtactacagaaaaactctgaagaggtcactcaaactttgttcaacatcagggaatttatattggagagctgtcttgcaaatgtaataaatttgggaaaacaaattttcaaaaactacagcttagaaaacaccagagtttatacgaaaatatattttcaaaggtgtagtaaaaataaaaaaaattttaatccaaatttgtctatgtaaataccagaatttatagtagaaatatatgaggaagcgacacttcgaatattctactaaatgagagttctgagtatagaaaataaaactaaagttggtagaaaaattatttgtatataatgttaagaggagtaaaagattttttgtagaataataactatattcggattatactttgtttcttgaaaaaattacagattttttgaaaagcaaatgatgtaactcaactcattattttctgctgtttcttcattcttattcacttgtgaaagcttgtgatcatttgttgctgcatcagaggtatgagagattcttcttcattagatgggcattatttatgatcttttctatggatgagtaagaatattaaaatgtaagatgcatggtgaaaatctaagtggagaggttctttgtggttaacttatactattgagtgatgcacaaggtaggtgttaagagtaatattcttttgcattatgagaaaactagtatattattcatatattttactaattgtactttttttattatactttaagttttagggtacatgtgcacaatgtgcaggttagttacatatgtatacatgtgccatgctggtgcgctgcacccactaactcgtcatctagcattaggtatatctcccaatgctatccgtcccccctccccccaattgtacttttatataataaaatgcagtacattttaaaaaattttaaattctgtgtgaaggtaactgtttcaacatttttaacatggtaaatattattgtgcattcaataaagtgttgttatgccacaaagattaacattttccaccttaccaaatggcatacgtaaaagatggtaacaatatactatttggtaacatcatggactaacatctgtagtcatctcttttgccagtggcttcgaactgcaaataagttaaagaatattgttcttataggttaaatttttatttttattttaatcatttaaatttatttttcttaatttttgtgggtacatgagtttatatacttatgccatatatggcatattttgatacacaaatacaatatgtaataatcacattgggatacgtgtggtatccatcacctctagcacttatttctttgtattaaaaacaacccaattctacacttttacttattttaacatgtacaattatggccaggtgtggtggctcatgcctgtatcccaccactttgggaggccgaggcaggtggatcaccaggtcaggagttcaagaccagcctggccaacatagtgaaaccctgtctccgctaaaaatacaaacaattagctgggtgtggtggcaggcacctgtaatccaagctacttaagaggctgaggcaggagaatcaagggaacctgaaaggtggaggttgcagtgagccaagatcatgccagtgtactccagcccaggtgacagtgtgaggctctgtctcaggaaaaaatatatatatacaattgttattgcctactggtttatttttatggttataataaaaattattttaaaatgtgcagttatggttgggtgcagtggctcacgcctgtaatcccagaacttttgggaggcccaggcgaatgaatcacctgagcttaggagttcgagatggccaggaacctgggaggtagaggttgcaatgatctgagatcgtgccactgcactccagcccaggcgacattacaagacttcgtctcacgaaaaaaaaaaaaaaaatgaacagttaaactgtaattgactaatgggttatttttatggttataaaagaaatcatatacaagtataaataaaatacatacacttctgagtcctgagtagatatcttaaaattttatacatatatatatatttgaacatgtgtcctgtctgcatggaaacacataccgacttaatttgggttaaatatacattactctaaaagataaactttaggcgtaaggaaattataaagtaagtgagtttgtgtgagtagaagtttgtacttattttcagaagaaatattggggaaaaattattttaacaaggtgactagtataaaactaaaagcctcaaaaatgctgaaagcaaatgtatactctgctttgtattgaatttattactagagttattgtatatgaaagtgtttcttaattttcattttgagatagttgttaaggcataggaatgctactgactttgatgttgcttttgtattttgaaagtttaataaatttgtttagtaaaatcttaggcttttcttttttctttttttttttttctttttgagattgagtctctcttgtcactcaggctggagtgcagtggcatgatcttggctcactgcaacctctacttcttaggttcaagcaatcctcctgcctcagcctcacaagtagctgggattacaggtattgtgccaccaggcctggctaattttttactttttttttttttttctatttttagttgagactgggtttcaccatgttggccaggctggtcttgatctcctgacctcaggtgatccacctgccgcaacctcccaaagtagtggcattacaggcgtgagccactgcgcccagccagtcttacttaggtttttctatacttcagattatgcatagggataaaagataattatacaggaataattaacttccatttgtcctatctggatgcttttgattttattccctaattcctttgtcttggatttgtactatgtttagcaagactgactttagtaaggatgagtgggcatccttgccttatactagctcttagagtaaaatcttgcaaggtatccctgtttaatatgttgttagctgtgtattttttgctaatatgtgacatttattggctgaggtgccaataatttgatctataattagtttttcagagattatcataagggaatgtcaaattttgtcaaacttccattgtgcatctattcttttgtactctgcatctatttacatgttagagatgtaaaatcacaactaattttacatatatacaaaaaatcatcagagactactatgaacatctttatgcatgcaaactagaaaatttggagaaaatgaataaactcctggatacacaaaactttccaagattgaaccaggaagaaacagaagtctagaatgggcaaaaatgtataaaacatatgatgaaattaaattagtaacaaacctaccaactgtaaaagccctggattatgtaaaatcacagccaaattttaccacatatacaaagatgggcttgtactactactgaatatactccaagaaatccaggtgggattccaccctaactcataatatcaatattatcttaattccaaaatatagtgaaggcacaacaaaaaaaggaaactgcaggccaatatttttggtaaacattgaaacaaaaatcctccatgaaatacgagcaatctgagttcataagcaaatcagaacgttagaataaaaataagacaagaatatccagtctaacactcctattcaacataattctagaagtcctagtcagagctatccaacaaaataaagaaattaaaagcatctaaatagaaaaaaaggaagttaaattatcttcacgatgatataatgctctacctaggaaaccttaaaaatttccagaaatattttaattttaaaatgtaaattatgactgtttaccttcatttctgtgcattttttggttaatattatggctgattgacaacatgttttaagaaaacttcttggaccaaagccattactttattaacgtaatttgagacaaaatagcaatgaaagtcaacattgatgagtgaaacagttacgatctagtccctgataatcatttcctctcccacccaacatgcaagcaccatctttgtgtcatctctcccagttctaagtgttgcaggatgcagaggactagagagaccagtatcggtgaatacaggagcatatttattttaaggtaggcaccagctcagtggattcacatccaaacttaaaaagcaaagactgagctcaaagactgagcaaacatacagaagcaaaacaaaggcagttaactatataatgacaggtcacgtaatttatagcataactgatgacttggcataacttgtggcttggcatagctggtagccgtggagctgcgttgaaagaaaaaagaactggctaatatagacatttgtttgtttgtttgtgtccttcacccttgcttcggaggggactgtctggagcctatttctttggttttgccttcttgaacaaggttatcttctaattttccttgaagtgagattgctaggcagaggaaaacttttctttttaacccctgccttgccacattctgggctttggcttttacttttcttggagttaatgaatgcagtacttattattttaaatttctgcctcagtttctcccctttgatgctttttataaacaaaattttaatagaaagcatcactattacttgattcattaagagacagcaggttttcttctttaggaacaggttgatatttatgcagagcattaggtgagtggtagtttgcctagctacaattgtctctatagttgattgaatgctcctaataaggaaggattaaaggcaaggaagtatcaaacaacctcctagtatggttagaactagtccttttaaggttttgaatccatcaaaggaggaaaaccagcctccaaagagggaatcaggagtccaccctttccaggtctggactgaaatatgggctaattttttcattcttgcagttatttctacaaagctttctcattgttatcaatttttaagcagcaattagttagattaaacttttcacatattccttcttcctgggctaggagatagtctaaagccaggctattttgataaacggcctttctcatttttgtgggctgctgggcaaagaagtctaatgcatttgttgtttcattagtgataatttcaaggactgcctgcaaccttatgatgcagttaagcatgtaaattgaggtgcagtacccccatgacccattttgtgcctaggtagctggcccacattattgaatccttctttcagtggccaatctgtatccttcaaatctcctttttttttttttttgagacagagtctcgctctgtcacctaggttggagtgcagtgccacttggctcactgaaagctccacctcctgggttcacgccattctcttgcctcagcctcccgagtagctgggaccacaggtgcccatcaccatgcctggttaacctttttgtatttttagtagagacggggtttcaccatgttagccagcatagtctcaatctgctgacctcgtgatccacctgcctcagcctcccaaagtgctgggattacaggcatgacccaccatgcctggcccccaatctcctatttgtatgtctttttttatgtttatatttcttttgtttcttcttttaatttcatcatagacaggataccctaaggtttttccttgttgcagtgggagtaaaaagaaatatggcttaattgtcttgaatatacaagcccctatctattttccttgtaactgttggtaggcccatggcccacagatccaatcaagaccagagggtgcttgtcaggtatttggagcttcaagctgataccaggtgtgatttagagaacagaaacaggagaacggatttggatgaggtgatttggagtcatttctgccccgccacaaagtttttcttagtgtttcattataatattgctgttctaagcaggttagttctcttactgggtttgtaaaagcctttccccagcgagcaacacagtatcttccaatgacagaagtttttcagagccagagacttgaacttacaggcattggttcaggggaattgtcagttaaagtaaaattatcttgtggcattaacgtttttgcttttcaaggccactggtctcccatgttcctctgtaaacataacatgaagaaatgcctaggctgccagcaatgttttgagccagctgagcaaacaggttctcagctaaaggaagagactctggtaacttctagtttacatgcttatagaatgatttaaagacttcggattgttgctgagccagacaggtccaggtttcttttttgataacatatagttaggttgctgggtatgtatttatgtagacatgtaagagtaacctgtagtccacatgggtaagtctgactttagaatggtgaagtttacaggattacaggtttttattttgcaatctggttttactggcattttggtaagcataattggcctctgttgtatgctaaggtgccatgatatgcagtaccaacaatccttttttgggatcccagcggaacaaggaggagttactcttggcatgcatatatatttgtagttatttctatagtatttaagggtaagttaccacagacgggtgagtctagtatgctgcctgataggcatccaagtacagagaaacaggcccttggtaaaagggagggaccttggtttggtttaagaggaaattttcctttgacattgcacgaatcttacaccattcaccaggcgaaaatttagagtcagagaatacataaggtttgttattttctgggccacaaattgagcaggtagtctgattataagtacaagttcctaagtgagtccctgtacacttataactatggtacaatagagttttagttataccagtccctgaccaggtagtatgtgtacagtggggacacccttctataggtgcttcttctagcatggttaagggggtaacaacagcaaaacaatatacagcttatttatattcagcaaggacggaagaggtctttatttgggggaggagactgagcacagtgacagaacaataggaaaacagtattacaaggaaaactactacttttaggatttttaaccacatttacttgcttgacaagttcttaagctttggctgtgcatagactagtcagattcctgtgtgtgactagagtagggcttgttgtcttcttatgcttccgccattcatagactggtcagcttccagaatgaccagagcagggcagttgtctttagcagcagcttgctctcgtctcaggatcagccgggttggatgatctgggtcctgctggctggcccacttgtcttgggctgctggttttagccaactgtggtggatccaagacacaacacctgaaactttaacagcagtgggagtggactagattacagtataggacccatcctatatgggtcctagagaagttggattcaactttttaaaccaaacagtctccaggtttaaaggggtgtactgggtctgtcagacttacaggttttttttaatgtaccaagtaatggacactttgcatagctatccgtagagcctgcatttgctttttaaagttaattcccctagttcctggagatcaacttttatttcgcttatgattgggggaggctgaccgaacaaaatttcacagggcaaatacccagtttgtttgctgggggtgcaactgactcagaggacgaccataggcaagacttgattccatcttagatgaatttcctgatattttttaagtagctgcttgagtgtcctgttcatacatttcactttttctaaacttcatggccgataggctgtgtgtaacttccattttatttttaatagtcttgttaaatcttgcactatttcagccacaaatgatgactcattgtttgatcctaaagttaaaggcagtccaaacctggcgataatgtcttttaaaagtactttagttacttttcatgctttttctgtcccggtggggaaagccttaacacatcctgaaaaggtgcaaacaagcactagcacggactggtagtccacagcatggacagttctgttaagtctgtaaccacgcttttacaaggcatggcttctacttcccgaattcctgggggccaagtgggcccctgttgcgggttgttttgagcacaggttaagcactgtttacaaatggctcaagtgatggcagagagccgtggcacatagaaatggcattttagtaacgtttctagtgccattttttccatgagttccttgatgaatttgctttacaaacatatgagcttaaatctttgaaatggctaatctcccatcgaagaatttccaccaccctccttgaatatatttttcagcctcctgggcaaaccagggtctttcatttggtgtataacttgggttttcttggagaggaggttctgggaggagagccatagctaaggcttcctctgatttaaaaaaaaaaaaaaatgcagcgtaattattgctatctgttttgcctctctgtctgcctttttgtttcctttggtttcccgtgttcctgccttttggtgccctctgcagtgtattacagctactttttctggagcccatacagcctttaggagctgtagaatcttttcgttatactttatttttttttctccagctgttgaaagcgttttttatttgcttttttttttttatagctccatgaatatgcagtgtggtaaaatcaaatttaaagccagtgtaaatattgaccttcttatcttttgccaacaacagtgctcttgttagggctattaattttgctttttgagctgatgttttgacattcgggtttctgaggggttggtttataaaatttatccgactggaggataccttatctgtggttttgacgcagttatggagaggagctcccggtgtgatgggaagcagagtagccagatttaggtgtttacttttttttgagacagaatcacactctgtgatctcagctcactacaacctccacctcctgcctcagcctcccaagtagctggggctacaagcacgtgccaccacaccaagctaatttttgcatttttagtagagacggggtttcactatgttgaccaggctggtctcgaactcctgaccttgtgactttccctcctcggcctcccgaagtcctggaattccaggaatgagccaccacacccagcctggatgtttactgtttttaaaataatgtaagagtttttacatagaagcccttagtactgagtcattcttgggtttgataaccaatgatgccctctttgatccattgaagttataactgagtgtggcacctggatggttagctgctgtcccagagttaatttactagcctcttgtgttaacaaaacagtggcagctaaggttttaaagcaagaaggctttcctagcaccacggagtctagttgtttggataaatatgccactgggtgatgctgtgatcctataacttagagtcagaaccccgtagcaatttccttttgttcttgaatatatagaaagaaaggtttacttatatctggtagtcctaaggctggggcctgaattacagcctctttgatttgtttgaatgctatttcctgattagtttcaggggttggaagcgcacaaatggactgctattccttatacctaagctggcattccttgtggcttactatgaaaactagacatttaacctcttcatggcaaatttaggctttctttttaaatacttagtaacctgctttcaataagagatggaggtggtctcgggttttatgataacagtcctctcgggttggggctgccaaaagaaggttgtccatgtactgtaacaaggtgcacttatcatttggcatggtataggccttaaggtctgaggccaacgcttccccaaagattgtgggagagtttttaaacccttgcaggagcctagtccaggtgagctgtgtagcttctttgtcccactgaaatgcaaagataggctgactaactggtgccaagcagatacaaaagaaagcatccttcaagactgtaaaccaggcagtacttgctggaatgagttccattaaagcatacaggttgggtaccactggatggataggtaacatggcttggttcacagcacacaagttctgcactggtctatacttattagaccctggtcctggcagcagtttttgtacaggcaaaagtggaatattgtacggcaactgggactggactaaaatcctatgtttatggagccactctaagtgtttgtaagcgccctgtacagccttttgggggaactgggtactgatgaacccgaacaggagttgctcctggtattaattttactactactgctgcatgatttacagctaacacaggtcggttgtcctcatcccacactccaggaatttctttaactaactgaaataataatttttcttttacatagaagcccttagtactgagtcattcttgggtttgataaccaatgatgccctcattggttatgagggcatatgaggttgcattggtgcttgcgatttatttttataaagtctccactcctcaacctgtgggatggtaagggttaacaccatggcctttgggtgagtcagatttaaagtcatatctccctgtgggccaaaagtaatttgtgcttgcagtttttggagtaggtctttttctaacaagggaactgaacaattttggaggtacagaaaatcatgctggacttctcgtccttctataacacacctctttgaccaacagaacagcctcttctttgagacaccagtagcctctacaatcgttgtatagttcttggatagtggccctatgggtcaagttactacagagtattcagccccagtatctaccataaagtccattaattggcctcccaacttctaatgcaaccataggctcctggaggcccaatgagaaggagcccagtttgtcctagttctcatatcttttagcccctgccagcccgattagatcagtattgcattgctttagggtttggcagcccctcaccgatggcctctctgtcacacggccttagccatttccctcattgccttctggacattcatctttacagtgtcctttctttttgcatcatgcacattgatccttctctaaccttggttggctctcgaatccctgtctaacttgacctcttccaggtccatgtctgcatcctctcacattaatagtttctctctctatgagggctgctgcttatagattgagtttttttttttttttttttttttgagacggattttcgctcttgttgcccaggctggagtgcaatgacatgatcttggctcactgcaacctccgcctctcaggttcaagtgattctcctgcctcagcctcccaagtagctgtgattacaggcatgcaccacaatgcctggctaatttttgtatttttttagtagagacggggttaagccatgttagtcaggctggtctcaaactcccaaactcaggtgatccacccgcctcggcctcccaaagtgctgggattacaggcatgagccaccgtgcccggccttgattggctttttttaaagcctctgttcgacttccttctttgccccctggtcatggttaacatacactttggtggctacttttataagctgggtggcattcatggctgcaaaacctcccagtgtctgaagattttgcttaatattactgtgggcctgtcctacaaatgatgtatttaccatatgctgattttcagcagcctcagggttaaacggggttaaaagctggtatgcctcacagagtccttcataaaactggctagggatcttacttccctgaagcacctctgagatctttcttatattgatagccttttttccaccatcccttagcctttgcataagtgccttttggtacctctgcaaatgctgaagctgagtcgcatcttctgagtcccagttgggattttggtctgggaactggccctgagcatatgcctgagcattttcttttttttttttgagatggagtctcgctctgtcacccaggctagagtgcactggcaccatctcggctcactgcaagctctgcctcccaggttcacaccattctcctgcctcagcctcccaagtagctgggactacaggcacccgccaccacgcccagctaatttttttgtatttttagtagagacaaggtttcaccatgttagccaggatggtctcgatctcctgacctcgtgatccacctgtctcagcctcccaaagtgctgggattacaggcatgagccaccgcagccagcctgcctatttactgcatctgctcgtgcatgggcttctagccagcagagagctgtctaggttactatcctgtgctccttagtgttatacagcatgagaagcagctgcctgcagtctggtcaggttggattctgtgtcagaaagatggactgcatcagatctataagagcttggggcttctccatataggagggagtatggtgtttccagtttaagagatcagtggttgaaaagggctgacagatgaaagtccattcccacccttggacttggccttggttatcttaataaatgggtcctcgtgtctccctgagaggcatttgcatatctcaagcacaaccagatctgagatggcctgcttgactatcttgacttctttccctgacctctcaagtctccagtctttcatttcagggtgagagttggggtgtgctagcacctgaatctggttcccagggggctgctggccttggtaaagtggggtaggctgtgacatatggagtaggaatctttattccctctggtggctcctgcaaaactggcttttcttgctccctctgggccttcttctttaactctgtatctgctagcgaagctgctcttactttcattttttggcttggcttaggccacaagtgttttgcaataagctgctaaacagggctggattcaggctggtcttgtttgtgctagatttaaccatgagtcaatataaggaaactgatctggatgccgaggctgtcctctgacctgtcaccaccttaaatacacggccaattattttcctatctatagttccttcaatcagtcatccaacactaaaagaaggcagttctaattcacagagagttcttaacctctggggggttagcttaactccataattccctgtaaaaccttctttaaagttctgtaacatgcgctccaatggagtggactttgatgactttactcccatttcctccctttactacgcagcacacccactcttccttttgcctcagactgaccagaccatccccaattacgggagttttcagatgctgcttggctttggagaggtccttattcccaccacaactctgagctgtggggcaactcctattggacgtatacagttcaccactagtccagggcagccccatactttgctcggagcacacagtcaatgctaagagatctgtgactccccacgtcactccttgcattgtattctcctggaaccatctttcacacacttttatatacgtccctgttcccagttcctgtgttcctaattggggtggcaagcaactctcaccacctccagtttcctttacctaaccaactaagcaagccactctcgcatcctgtgttggttgaggtgtgagattcttctgaattggcaagcccctcttgccgccccaagcctctctgggtcggactactagttacaccccgggaggtgatcaggctccccttccgtccttacgggacgggtcctgccttggtccccaataacttaccgtggttcctaaagtgcgctatttctggaatcatcctgtagcccttctcaggctccgttgcactgctgggtagggatgccgggtcatgggagagctgatttcccctccgggctgaagttctcccggcggtgcctgggtcccaggtttcccttgaatcaaggctccagccccgattttcccttgaatccggggctccagccccgatttcaaggcaaaggagacagtctctgctcctggctggctcgccaagaaatgtgggacacagaggactagagagaccagtatgagtcaataaaggaggatatttattttaaggtatgctctggctcagtgaattcacatccaaaaagctgagccttgaacaaagactgagtgagattttaataagtaaacttacagaagcaaaacaaaggcagttaattatataatgaccagtttatgtaatttatagcataactgaattcttggcataacttgtggcctttaatagctggtggccttgtagctgcattgaaagaaaaaacaagaactggctaaatacagacgtttgtttttctttgtttccttcacccttgcttcggaggggagtgtctggagcctatttctttggtttcaacttctcaaacagcattatcttataactgtccttgaagtgagcttgctaggcaaagaaaaacttgttcttttcttttcaactcttgccttgccacattctgggctttggcttttacttttcttgaaataaataaatgcagtaattatctcattgagaggcttctgatcaaattgatcagcaagtcaaactctctgcttaatcagcagtaactttattttcactcttcaaaggcattttacctgcctgaaatgcaaaggggcagttcaagtgactgtgctgagctggtcctctccagtgtcagtctattcacattcacacaggtgatcttctggtgtaagggggtgcacttcaacagcattatcacagcaatgtggaacagatgtaacagaataaaagaggaatcactgccttccaggaaaaggagttaatcttattcattttgtgtatgagtacgtggagaataaagttacagagaacgctttacattagtagtgcagtgcagatcctatgcaatcttcttgtttgtcaaacataccctgaatggttttattaagtactatgtttctggatccaccccttatttgattctgataatttctactttatcaatttaaatattcactcaacatcatccagatttctgtccttgatgcttaagtcctcagacataaaatattattgataaaaacatgagcctttattttactacagagcatttctttagcttggaaagccaaatttggtcaaaatgaaatataacaatgaatataaatcattttggaagtgaattcaaattatttaaaatattaaatttgatagatatatgtgtcagaatttttaaaaaatttgaatacataaagctgaaacttgaaaaatatacatacatgcttttaagacaaatcactttaaaagcatgatcatttaagtttttaatttagcagttttggctatgttgaaaatgtaaatatgaaatatcacataaaataatgttaagaaaacaaaacaaagcacaatagtcctgaaggctgttgtgagacctcggttcttagtttcaaaaatttaaacgagacgcaaaaaaatgaggatgcagcatagatagatttatcgcaaagtagaaacactattttaaaagtgcggtgcaaaacacccctgagagaaaagcaattcaggatgggctgcttataagaatgagacagcaaagactggaaatagagagactccatttatcggagtcttacataattatttacaaagagttagaaagtggtgttattagtaagcatgttctgggtggtcctcttggtgcacatacacagtggctgtacatgcttgtttatatgtcacatatctcattagcatatgtcacatatctaattagcatctcattagcaaaaactccactcacgtgtgtgttttttagtattacgatgagtaaaaggtcagaggacaagtaaaatcaaaatgtgcatgctctttatgggggaatatccctactagagagctttgcttgaatgagctgaaacgcaatgcaaatgttggggtttattgtgttgataatatgctatcaccaggaaatcgccatggctgctgcatcctgaggacatggtgaccttcttggctagctagccagcttcaataatacttatcttagtttattttcaactatcaactctgagacaaagatttacctgttatgtcaatattgtcaaaagtgagaaaatgacaattttaaaatcaaacatatttgagcttgatttgggtcactagctgtgtacccaggagaaattattttacatccctggagcttcagtcaatatgtatgcattggtgtatgtttgtttttttggtgtaggtttttgtccgtttacatttttaaagatattttttcctactttatgctgatgttaagctacacaaaacttaccaagagctctattttactacttttttttttttttttttttagtatttattgatcattcttgggtgtttctcagagacggggatttggcagggtcataggacagcagtggagggaaggtcagcagataaacatgtgaacaagggtctgtggttttcctaggcaggggaccctgcggccttccacagtgtttgtgtccctgggtacttgagattagggagtggtgatgactcttaacaagtatgctgccttcaagcatctgtttcacaaagcacatcttgcaccgcccttaatccatttaaccctgagtggacacagcacatgtttcagagagcacggggtggggggtggggggtaaggttatagattaacagcatcccaaggcagaaaaatttttcttagtaccgaacaaaatggagtctcccatgtctacttctttctacacagacacagcaacaatctgatctctctttccttccccacatttcccccttttctattcgacaaaaccgccattgtcatcatggcccgttctcaatgagctgttgggtacacctcctagacggggtggcggccgggcagaggggctcctcacttcccagacggggtggccgggcagaggcacccccccacctccctcctggacggggcggatggctgggcgggggctgccccccacctcccggacggggcggctgccgggcggagacgctcctcacttcccaggcggggcggctgccgggcggaggggctcctcacttctcagacggggcggccaggcagagacgctcctcacctcccagacggggtggcggtcgggcagagacagacactcctcagatcccagacggggttgtggccgggcagaggcgctcctcacatcccagacggggcagcggggcagaggcgctccccacatctcagacgatgggtggctgggcagagacgctcctcacttcctagatgggatggcggccgggaagaggcgctcctcacttcccagactgggcagccgggcagaggggctcctcacatcccagatgatggacggccaggcaaagacgctcctcacttcccagacagggtggcagccgggcagaggctgcaatctgggcattttgggaggccaaggcaggtggctgggaggtggaggttgtagcgagctgagatcacgccactgcactccagcctgggcaagattgagcactgagtgagcgagactccgtctgcaatcccggcacctcgggacgcccgggcaggcagatcactcgcggtcaggagctggagaccagcctggccaacatggcgaaaccccgtctccaccaaaaaatacaaaaaccagtcaggcgtggcggcatgcgcctgcaatcccaggcactcggcaggctgaggcaggagaatcaggcagggatgttgcagtgagccgagatggcggcagcacagtccagcctcggcttggcatccgtattttactacatttttcaaccaaaaggttaaatacttaaatattgaaagtgacattctggattatccttttccacgcagactacattgcagtttttccttatgtggtgcaaggttataaaaatgccattcagttgatttcttaagtaaaagtagaacgtgttttctcagacagtagcatgagaatttttgacacactaccattagacataatgaaagcaaatgaataaatgtgttgaaatttgtctttattcacgagatcattagaggctaagtcatggcaacacgtgtagttcaattcaattttttttgtgtaaaattttgttgagctgcatccatctgcatatgtaacactaatttggtaacagcttctttatactaagccagaattaatttgtcctcatggttttgttttaaatgtgtgagctgtattatatcacatttgaacaagtaatatagagaatataaatttagtttagagaaagaaaagtacaggcacactaaaaatgaattagaatctggcagctgacactgattaacaggttgagcaaattcaactagacctaaatctctgtaaacaattttgaaagacagaattctaactaaaaacatcttcaacaacataataaacctacgagattaaaaaaaaaagttggtttacccatcatcaatcaatactaggttaaattagaaaattgtgaacacatcatacaaaaagtaaaattactaaactatcctcagacttcatctgattaaaacaagacttctgggtatttgaaagcaccaaattattgatgaaaaatatctattctgaacagatccttgatcttatatacatattactactaagtaaaacctaatacagctttgatttctgaaatatttgtgaatgtctgtcactgcactcaaaaatcaagaaattatttcatctgtctaaattttgaggaaaatatttgctattttaattgaatgccagtagtgtgtgaattcatgtagtgtggcaaaccacccatttctttagtattctgctatttttataaaataagccagaatttgtggagacatttgtaaacaaaaaatctttcctaaaagttagacatcagaaaatagcgatattaatgttacgttatatacacagtttgctaaaccctaccataatctgtaaagtttttgtgtacaacaatcttagattaccgaaaacaaaataaaatttttctttttttttttttttcagacagagtctcactctgtcaccaggctggagtgcaatggtgtgatctcggctcacgtcaacctctgactcccaggttcaagccgttctcttgcctcagcctccctagtagctgggattacaggtgcctgccaccacgcccacctaattttttgtatttttagtagagacgaggtttcactatgttggccaggctggtctcaaactcctgacctcaggcaatccacccacctcagcctcccaaggttctgggattacaggagtgagccatcatgcccagctaatgaaatttctttcttatgttatgcttaacatatatacatatatatatccggacagacaggaactatgactgccactttaaaaaacaaatatttcagcacaatacaatgttttgtgtatgtacagaaggaaaaccaaactttgaagttttcaaatcataaacagaagcattatttgtgattctaagctttaaatatataaaacaaatatttattcttctttttattattatactttaagttctgggttacatgtgaagaacatcagttttattacatacgtgtacacatgtgccatggtggtttgctgcaaccatcaacccgtcacctacattaggtatttttcctgttatccctcccttagccccccagcacctgacaggccccagtgtgtgatgttcacctccctgtgtccatgtgttctcactgttcaactcccacttatgagtgagaacatgcagcgtttggttttctgatcttgtgctagtttgctgagaatgatggtttccagcttcatccatgtccctgcaaaggacatgaactcatccttttttacacctgcacagtattccacagtgtatatgtgccacattttctttacccagtctatcattgatggacatttgggttggtttcaagtctttgctattgtgaatagtgccacaataaacagacgtgtgcatgtgtctttatcatagaatgatttataatcctttaggtatatactcagtaatggaattggtcaaatgttatttctagttctagatccttgaggaattgccacactgttttccacaatggttgaactaatttacactcccaacagtgtaaaagtgttcctatttctccatatccactccagcactgttgtttcctgactttttaatgattgccattctaacgggtgtgacatggtatctcattgtggttttgatttgcatttctctaatgaccagtgatgagcattttttcatgtgtctgttggctgcataaatgttttcttttgagaagtgtctgtccatatctttgcccattttttgatggggcagtttgtttgtttcttgtaaactgtttaaattctttgtagattctagatattagccttttgtcagatggatagattgcaagaattttctcccattctgtagttgcctgttcactctgatgagtttcttttgctgtgcagaagctatttaatttaattagatcccatttgtcaattttggcttttgttgccactgcttttggtgttttggacatgaaggctttgcccatgcctatgtcctgaatggtactgcccaggttttcttctaggatttttatggtcttaggtcttacatttaagtctttgatacatcttgagttgatttttgtaaaacgggtaagaaaggggtccagtttcaattttctacatatggctagccagttttcccaacaccatttattaaatagggaatctttttctcattgcttgtgtgtgtcaggtttgtcaaagatcagattgttgtagccgtgtggtggtatttctgaggcctctgctctgttccattggtatatatctctgttttgaattctgcatttccactttacaaatcccacagttctgctatttcacagtaggatttgacactaaataagtattttttgatggtgacagagtgatatcaatttctgaggccctgttctgttccactggtctacatatctgtttggtaccagtaccatgctgttttggttcctgtagccttgtagtatagtttgaagccaggtagcctgatgtttccagctttgttcttcttgcccagtattgtcttggttgtgcaggctcttttttggttccatatgaagtttaaagtagttttttccaattctgtgaagaaaatcaatggtagcttaatgaggatagcattgaatctataaaattactttgggcactatggccattttcacgatattgattcttcctatccatgagcatggaatgctttcccatttgtttgtctcttctcatttccttgagcagtggtttgtagttctccttgaagaggtccttcatgtcccttgtaagctgtattttcctaggtattttattctcttactagcaattgtgagtgggagttcactcatgatttggctctctgtttgtctgttattaatgtataggaatgcttgtgattttttgcacattgattttgtattctgagactgctgaagttgcttatcagcttaaggaggttttgggctgagaagatggggttttctaaatatgcaatcatgtcatctgcaaacagagacaatttgacttcctctcttcctattttgatacgctgtattgctttcccttgcctgattgccctggccagaacttccaatactgtgttgaataggagtggtgacagagggcatccttgccttgtgccagttttcaaaggaccgtttattcatcttaatttaaaatacagtggtttttgaacaattcaagtagcattagactattaaaaacatcatgagccacacaagtgtcaactgcattttcagaattatgagaacttagaaaaagtaaaccaaacacctttagtttagttaaaaacatactaaactactttgtatttgcccttgtgatgagaatcatctttattcattttggaacaaacaggaaatgctgtggtggtaacttgctggtggtgactgtgatgatatttactgtcttagggatgatgggattcagtggaccagaatcgtcaggaccttactatggtcactgctgtttaattctcttctgtcattcattttccagactccttcatcaatttcatttctatcattgaatgaatgattttgcactgctttagcatctgcctttgatttctgctaattttctttgttcatttttcttgtccatctctggtggctgctttgctattcaactttgaggagtttgtgctgcttcaccctcagctgctccaacagtccatccatttgcctcaagctctctggcagggtctccaggttcttctgtgtctggtgtctgagatttatcagcaggagcttgttttcaatgaccacagctaccgccgtctcctgccagtggggtggtttctacaagagccaaagtgcccatgcccggagacaccttggttataaaccttggtcatggcccagtttggtgcgcaaaaacccaatgtcaaccagagcatttcgcacagatgggtgagctttccttggcacatggggcagttcccccatcatctctatgctgccacctccccttacacaaaggatggtgtaggggcctgaagacaccgtggaagagtccagggagttaggaggggctgggccaggcagcctcaggcccagaggatggcagcaccccctcacacctgagcagacatcagccactgccacctcggggaggacagaggagcccaggctcccccagccagcctcactctaaaccagcagaggaaaaaattattgttattattttttaaagtgagatggagtcccgctctgtcacccaggctggagtgcagtggcacaatctaggctcactgcaacctctgcttcccgggttcaagtgattctcctgccttgcctcccaagcaactgggactacagccgtccaccaccacgcctggctaatttttgtacttttagtagagatgaggtttcaccatattggccaggctggtctcgaactcctgaccttgtgatcaccccgactcagcctcccaaattgctggggttacaggcatgagccaccccgcctggctgaaaaaaaattattttctaaaaaacaaaaaatagtataaaaaataatatgcagaagaacttgcatatctaacctgatcaaatttttattctttttctttttatttctgccttttcctcttaaattgtgctctcctgaagtcatgttccatcctcatgtgggaatttaaaagtaattataatggtcacaaatttagaaactaaaaaattttaatatatttttgcccacaagtcctggtttaacattaaactttcaatagtgctttctgaattctacactttattttctatttgattctgttaactaaaatataggaagtaaaaatataatcttgatttgcagtttcagtttacaaagaatatgtattcattcttttaacctaaatgtgtgttgagcacacatgatatgccaacaatttggtagccttagaaaatagaagccaggcagggtggctcatgcctgtaatcccagaattttgagaggccaaggtgggaggatcacctgaggtcaggtgttcaagaccagcctgacggggtaaaaccccgtctctactaaaaatacaaaaattagctggttgtggtggggggcacctgtaatcccagctacttggggggctgaggcaggagtatcgcttgaacccaggaggtggatgttgtagtgagccaagaccatgccattgcactccagcctggcaacagagtgacactccgtctcaaaaaaaaaaaaaaaaaagatttaaacataatattgttttaaacaattttatgtcattatatttaaaaaattagatacaattattatttttccagaaaggtatgtggcaaaaagtgactgaagaagaaataaaagagagcccaggtgtggtggctcacacatgtaatcccacgactttggaaggccaagttgggaaaatcacgaggtcaggagttcaagaccagcctggccaacatggttaaacgctgtccctactaaaaatacaaaaattagctaggcatggtggtgggcgactgtaaccctagctactcaggaggctgaggcagagaactgcttgaacccgggaggcggagtttgcagtgagccgagatcatgccactgcacttcagcctgggtgacagagcaagactccatctcaaaaaaaaaaggtaaataagaaatctaaaatttatgtttttaattttacaaaaataaaaaatacatctattataagagaacagcttgagccgggcatgctggtttatgcctgtaatcccaacgctttgggaggccaaggcaggtggatcacaaggtcaggggtttgagaccagcctggctaacatggtgaaaccccatctctactaaaaatacaaaaattagctgggcatggtggtgggcacctgggattacaggcatgagccaccacgcctggctgacatctgctattcttaactgctctataagcctgctgaatcacagggccatagagcaatcactgttgtttacatgctttttgtcaggcagttcttatgagcctgcaaatgttatattattcccaaccactgacatcaacatgcatttttttactttttattcaatagggaaaagccccacgtttttgcttccaaccatcacagtcataaagaaatagtcccagttccctggtaactctgctttcccacccctacatgagacagcctttgtgaggcacgcccccatggcttgccttgctcttgtttctggtgcaagtgtattaaacaccttttaatggcattcaactttcttttatgaattaagatccaagcaaaattcaaatcgtgttgctgtgctttgttatcagaaataatatggggttgggatgggtgtggtagctcatgcctgtaaccccagcaaagggtggtgggaggctgaggcaggtggatcacttgaggccaggggttcaagaccaacctggttaacacagcaaaaccccctctctactaaaaatacaaaaattagccaggtgtgctggtgggcaactgtaatcccagctacgtgggaggctgaggtacgagaatcacttgaacctgggaggtggaggttgcagcgagctgagattgcaccactgcactcctgcttaggcgacagtgcaagactctgtcccatttaaaaaaaaagtaattgacagtttcataaaaataatacttaatttgtaggctgatctaggaagcatggatatttcatattcattcctcaaatccataagcataaaattttttttatttatttgcattgtctctgattactttcagtaatgttttgtagttctttttttttatttatttatttgcattgtctctgattactttcagtaatgttttgtagttcttttttttttttttttgagacagagtttcactcttgctgcccaggctggagtgcaatggcgtgatctcggctcactgcaacctccgcctccgcctcccatgctcaagcgattctcctggcttagcctcccaagtagctgggattacaggcatatgccaccacgcccggctaattttgtgtttttagtagagacggggttaatccacgttggtctggctggtctcaaactcccaacacacttactccataattttcttacacctaaggtttgtctttagattaataaatatttaactctatgtaaatcaaaactaaaagtcttatgtgtttgcaggcagacaggccacatgttccaagaaaaatatataagaaatttgaaaaaatattaagaatttaacaatgaattttatttatactcatatataatttttattatgaccataaaaataaccctgtagtaaataacaatttaattgtacattttaaatttaaaaaaaagtgtagaattggattataaaacataggataaatgctacaggtgaaggatgcctcacttaatgctgatattattattatatattgtattcctgtattaaaacatgccatatattgcatagatactcatgcagccaccaaaattaaaataaatttaaatgattaaaaacagaataaaaatttacctacagaaacaatattctttaacttatttgcagttgaaagccactggcaaaaaaaaaaaatcactagagatgttaatctattatcttactaaacagtatattgttaccatcttttacctatacccttgagtaaggtgaaagaggttaaagtttgtggcataataacgcttcattgaatgcacaatagtatttaacatgttaaaaatgttgaattaaactattaacttcacacataatctaaaatttataaatgtactgcattttattatataaaagtacaatcaggccaggctcggtggctcatgcctgtaatcccagcactttgggaggccaaagtgggcagatcacctgaggttggcagttcaagaccagcctgaccaacatggagaaaccctgtttctactaaaaattcaaaattagccaggcatgggggcacatgcccgtaatcccagctactcaggaggctgaggcaggagaatcacttgaatctgggaggcagaggtcacagtgagccagagatcgtgccaatgcactccagcctgggcaccaagagcaaaactctgtctcagaaaaaattagtacaattagtacaataatatactactcatttaattttaaataaaattaaacatgttttcttctcatgataatgcagattactctgaacacctacctgatgcatcactcaatattataggttataagagcctctccacttagatttttattatgcatcttacattttaatgtctttacttttctatagaagaggtaataaacaacacccccctaataaaaaagaatgccttgccaggcatggtggctcacacctgtaatcacactttgggagactgaagcgggcagatcatgacgtcaggagtttgagaccagcctggccaacatggtgaaaccccatctttactaaaaatacaaaaattagctgggtgtggtggcaggcacctgtaatcccaactactcagtaggctgaggcaggagaatcacttgaaactggaaggcggagacggaagtgagccaagatcattccactgcactccagcctgggcaaaagagcgaaattccatctcaaaaaaacagaaaacaaaacaaaacaaaaagaatctctcacatctttgacgcagcaacaattgatcctatgctttcacatttgactccaataggaatgaagaaacagcaggaaataatttcagagttgaatgacatcattattcacttttcaaaaaatctgtatttttttcaagaaatatactttgaatgtaattataattctgcaaaaaaccttctgatcctctgaaagttacatacaaataatttttctgccaactttagttttagatttcctatactcagcactgatttagaatacgtgaagtgtgtcagtgccttatatatttctaccataaattctgatatttgcatagacttaattatggattaaatatttttttacatgtactgcatctgcaaaagcatactccagtatgaactctctgttgttttctaagctgtagtttttgaaaaagtgtttttccaaatttattacatttgcacaatttttccccgatggaactttgttccacagaaggaatctcagataatactttttaaaagccaaccccagacatggatttgtaccatcaaatacctgagttgggtgaatttatctcctcttgaggctccaagataaacctggggttcctgagtttgtcagaaagtgaccttcaggatttctgacctgtggtaagtaaaaatgtcatagtacagggaatatgtagacaagatttgaatccagttttcccgaggggcttttaattggctccataaatcaagtttgattccttaaaaaaggaacaccattccagtcaaagtgttggtaaaataaccagtttctccaattgtgtcctgttacttataaaaaccagattcttggcagggcgtggtggctcatgcctgtaatcacagcactttgggaggtcaagatgggtgaatcatgaggtcaagagatcaagaccatagtggccagcatggtgaaaccctatctctactaaaaatataaaaaatcagctgggcatggtggcgctcgcctgtagtcccagctacctgggaggccaaggcaggaggattgcttgaacccaggaggcagaggttgcagtgagccaagatcgggccaccacactctagcctggcaacagagtgagactctgtctcaaaaaataaataaataacacaacaaaacaaacaaaaaaaaacattcttaatgcacttatgcaaataaatgtattgccataagttaagaatactcacaaatagtttccaaattctagagaaatcaagtagagagaattaaatatgctttaaattttgttcacaggagtatactaacttgttaaaagctgtaaatagatcaaaaggtaggtttccttgactcagaaaacaaaagaaaggatcagcaacattttaagtaaaaagtcaaaaagatcagctggtctcggtggctcacgcctataatcccaacactttgggaggccaagcaggcagatcatgaggtcaggagtttggaccagcctgaccaacatggtgaaaccccgtctctactaaaaatacaaaacttagccaggtgtggtggcatgcatctgtaattcagctgagatcacaccactggactccagcctggaagaccgagtgaaaccccgactcaaaaaaagaaaaaaagattacttcagtcttctaatagttcaatgcatgcacttaatccttgttctgcttaatattcatgaacatttcagctctccatgagttctgaatttttttcctctactctgatgtcaccatctccaaagttatcagaaacttgcattcaagaccacctgttaagagttttatagctgattataaaaccaccttctaaagaggaccaaaacaatacaattgtctgtgaatgacaaaaagttttaaggcaaccaaagtcaaagatacaattgacaaggaaatttgttacctctgtggcaatatagcaattataattactgctaataatgtacactaagtcatataagaattataggagtttcccataattttagaacaaataccaataatatacttatacaaacacagcccaaaaaaaccaaacaccatttcatattcaacaacgttctctgtataatttttataagaaataagcaaaattatgtcatttttaaactttagggaacataatattttaaaggattaggtaagaaaaatacataatttataatttgattttggaaagtttgatggaactttgttccacagaaagaatctcagtcaaatatcaaagatttaaaacacctgatgtcacaggtcattgtaaaataagtcattaatttgaccaaagtaataaagatttcaaaaacaaaaaaagaaaaaaccttcattctttgggagacaagacttaattttccaaacaataatcttcaataaaacagcataaagccaattaaatttgtttttcaaaatgttatgaacaatctataaaattctaatcttgaccatgagatataacttctataagcctttattaaggagtcagttaatgcttcaagaaaaccttgttaatctaacactggggcccctattctggtcttgcattagtgtgcctttgacattaatgattaatgtatagaaaaactgaacttattttatctctcaaaatcagttcttacaatctcacatgcccacctcttttgtgatagtctctgggcctttaggagttgaagagctttaatttcatctcatctgcttcgaaggtggctcatggttgggctatcttcatctaggagagtattccaggccagaccctacttaacctaaaataattaaaaaggtcagaatttgaaaataatttatttaagttcaaatattaaggatagccaccaaataacagatttaagtagccctgaatatatattccaattagtagccattacaagccggttttttggaaacagtgcgaaggcagtttctaagttgtttaccaagaattgacattaaaattattggtaaattgattgggtattgattggctatatatatttgttttacatattttatgaaaaacgaaataatggttgagacagctagtcagaaacaaaatgtctttaaacaattgcccctgtgcacagatgtggggtaagattgaagtctcatactctcatctttctgggcttgataaattgtgcagaactcaaagagcggagactgctctgagctacttttctcaccgccttgctcaggacacataaaccccttaggtgggcagatcacctaaggtcaggagtttaaaaccagactggcaaagatggtaaaaccctgtctctactaaaaataaaaaaaggccgggcacagtggctcatgcctgtaatcccaacactttgaaaggctgatgcaggtagatcatgaggtcaggagttcaaggccagcctggccaagatggtaaaaccctgtctctattaaaaatacaaaaaattagctgggcatggtggcaggtgcctgtaatgccagctacttgggaggctgaagcacagaattgcttgaacccaggaggggaaggttgcagtgagctgagattgcgccactgcactccagcctgggtgacagagcgagactccatctcaaaaaaaaaaaaaaaaaaaaaaattagttgggcatggtagtgtgtgcctgtagtcccagctacttgggaggccaaggcaggagaattgtttgaatctgggaggcagaggttgcagggagccaagatcatgccactgcactccagcctgggtgacagagtgagactccatctcaaaaaaaaccaaaacaaacacaaaaaaattagtcgagcatggtagtatgtgcctgtagtcccagctacttaggaggccaaggcaggagaattgtttgaacctgggaggcagaggttgcagcgagccaagatcgtgccactgcactccaacctgggtgacatagtgagactgtctcaaaaaaagaaaaagaaaagcaatagttgtgttgtgggattcaggagactggagagaccaatgggtgagacaggagaatttcattaaggtggccactggctcagtggattcaaatccaaaaggctgagccccaaacaaagatgaggcttggcttttaagcatgcagtggcatgaaactcaggggcgggcttagcatcctacagaagcagaacgaaggcagttaatcaaacagtgaaaggtatgtgactcaaacatatctagtgacctctgctgggctgatcatcagactctcagcagatggtaactatcttaggtttgctcaggtatgtcttgtgaccttcgcagtgttgcactgatggaaaataggaacttacaaaatctttacaaacttacagaaatagttaaaaaatagttatgagagcagagcaaagaaatgctggtctgggaaggaatctcaagagagggaagctgataagaacttgttattctcatccctgttcctggagtccattccttctgggctctgcctggctttgcagataacattatcttagtcctcgcaggcccttggagtgagtcaacccagtacagggaggaacttaggtttttctcctttcaatttctgctttagttgaacacagaatattattttataaataacgacttagtaattatatagaaatcactaatcactttactaatacactgcatgtattggtgttttgttttgttttgagatggagcctcactctgttgcccaggctggagtacagtggcgtgatctcagctcactgcaacctccacctcccaggttcaagtgattctcctgcctcagcctcccaagtagctgggattaccggcacctgccaccacacccagctgatctgtatttttagtagatgttggccaggctagtctggaactcctgaccttaagtgagccactggtctcggcctcccaaagtgctgggattacacgtgtgagccaccatgcctggccagtttagaacttttacaaaatgaaataataaaactgaattaatttattttaaaacaatatgaacaagtataataaatattacaagtccccattcagataaagtttatttatttatttatttattttgagatggagtttcactctgtcacccaggctggagtgcagtggtgccatcttggctcactgcaacctccacctccccagctcaggtaattcccttctctcagcctcccgagtagctgggactacaggcacatgccatcacgctcagctaatttttgtatctttattagagatggggtttcaccatattggccatgctggtctcaaactcccaaccacaggtaatccacctgcctcagcctcccaaactgctgggattacaggcgtgagccacattgcccggcccattcagataaagttttattaactctatgaagatttgataaatggcaaatatgacattttcaaatagttttgtgatgaccagaaaaaataatctattaggtatttttataacaaaataagacaaaatgatactagtgatattattacaaaatattttcattatttcatatagtatatcataaatttaatcttaaaatattataaatatgctagaggttctcaaaactaaaaaaaaagcaaaataactaaatcattcaaaattggctttttttgttgttttaaaaataaagtttaaggctaggagcggtggctcatgcctgtaatcccagcactttgggaggccgaggcgggcggatcatgaggtcaggagctcgagaccatcctggctaacacagtgaaaccccgtctctactaaaaatacaaaaaaattagccaggtatggtggcgggcaactgtagtcccagctactccggaggctgaggcaggagaatggcgtgagccggggaggcggagcttgcagtgagccgagatcgtgccactgcactccagcctgggggacagagcgagactccgtctcaaaaaaaaaaaaaaaaaaaaaaaaaagtttaaggctaatcatatgggtaatacaactagacccctacctgtattaatacaattacaatttgacatgagatttgggtggggattcagagtcaaaccacatcattctgctcctggccctcacaacaaacctcatgtcctagtcacatttctttttttttttttaagatggagtctgactctgttgcccaggctggagtgcagtggtacaatctctgctcactgcaacttccacctcccgagttccagcaattctcccacctcagcctttcaagtagctgggattacaggcatgtgccaccatgcttggctaattttttgtatttagtagagatggggtttggccatgttggtcaggctggtcttgaatgcctgacctcaggtgatccacccacctcaccctcccaaaatcctgggattacaggtgtgagccaccatgcccagcctcctagtcacatttcaaaacacaatcatccattttcaacagtccctcaaaatcttttttttttttttttttttaaagacagagtctcactttgtcacccaagctgtagtgcaatggcatgatctcggctcaacacaacctccacttcccaggttcaagcaattctcctgcctcagcctcccaagtagctgggattacaggcacccaccaccatgcctggctaatttttgtatttttagtagagacagggtttcatcattttggccaggctggtcgcgaactcccgacctcaagtgatccgcctgcctcagcctcccaaagtgctgggattatacgagtgagccacggtgcctggcctgctcccccaaattcttaactcatttcagcataaacttaaaagtccagtccaaattctatctaagacaaggcaattctcttccacctatgagcctgtaaaatcaaaaacgacttagtcacttccaagatacaatggttatgcaggcattgggtaaattctcctgttccaaaagggagaaattggccaaagcaaatgagctccaggtcttatgcaactccaaaacccagaagggcagtcattaaatgttaaagctctaaaataattcccttcaactccatgtctcatatctaggccaccatgatgcaaggggtgagctcccaaggccttaggcagctccacccctgtaatctgcagagtacagcccctgcagctgctttcacaagctggcattgagtgcctatggcttttccatccaactcatataaacttacttaaccttaatcactttctaaaattgttgttttcaaatagaatcacattggaggttatggcttaccatatgaattttgatagaaaagtcagtctaaatcatgggaaataaccatatagaggtaatattttatatctcattggaattaatataaatatgtttttattttttattttttgaaacgtagtctcactgtgtcccacaagctgcagtgcagtggcgcaatctcacctcactgcaaactccgcctcccgggttcatgccattctcctgcctcagcctccagagcagctgagactacaagcacctaccaacacacccggcttattttctgtatttttagtagagacagggtttcactgtgctagccaggatggtcttgatctcctgacctcgtgatccgcccgcctcggcctcccaaagtgctgggattacaggcgtgagccaccgcgaccagctgaattaatataaatatgaagcagattctggtaagttaagatgtatattataaggcctagagaaacaagttagtaactttaaaaacatgaacaatcactatagaaatctaaatattacatggaaagtatctaatataaaagaaagcacttaagaaagactagcccgggcctggtggctcacgcctgtaatccagcactttgggaggctgaggcaggtggatcatgaggtcaagagttcaagaccagcctggccaagatggtgaaacctcatctctactaaaaatacaaaaattagctgggtttggtggcaggcgcctgtaatcccagctacttgggaggctgaggcagagaattgtttgaatccgggaagtagaggttgcggtgagccaagattgtgtcactgcactccagcctgggtgactgagtgagactgcatctcaaaaaaaaaagaaagactaaagacaattctaaaactagaaaaagactagagtgtggttgaggacacatggcccaataaagtttccaaaggaaaacctcaattcaaagatgtctgggcaaggcatttgtgcctgtggaagataaaaggagaaaaagcgggaaaatttttgacagtggaatgtaaggggattattttttacctttctctcatgtaaaatatttacaaatagaaaacaagtatttttaaaagtgtcatccagtgctctgtgacaaagtgattaattaaaatactgtttctgaaatgtacaataaaggacaaaaatagttgataatgttgtgaattgaaggggagaagttggctttggggaatgttggaaagaaactgggaatttaagattttactgcaagcctggcaaggattttactggcaaggctgaacaggacagagtagtggatttgagaccctgcttgccacacatgtggaaaatacagggtgacaccagtgcgtctgattaaagtcaaaataattaaatagcaatatttggactgaagtggcgttagtggtctaggttcctatgtaacaacaacaacaacaataaaatctagctcaaatgtattttttgtaagttactaccttaagagaaaacaaaattcaggtttaatcaaccacaaatctccaattaatctgattacataacgaaagaattttctcctggacactgcaaatggactacctaactgtacccaatcgattaatttgctttgcttcatcacacaccttatagaagccttttcttcaagaccctctggtagccccaaaaccacaaacgtcgggcgcagtggctcacgcctgtaatcccaacactttgggtggcccaggcaggcggatcatctgaggttgggagttcgagaccaccctgaccaacatggagaaacccccgtctctactaaaaatcaaaagtagccgagcgtggtggcgcatgcctgcaatcccagctaagtaggaggctgaagcaggagaatcgcttgaactcgggaggcggaggttgcggtgagcctagatcgtgccattgcgctccagcctgcgcaacaacagcgaaactcccatctcaaaacaaaacaaaagcccccacaaaccatgtctggggactgtcccattgattaatcactgtttgtgcatactaagtcttttttttttttttttttttttttttttttgagacggagtctcgctctgtcgcccaggctggagctcagtggagcgatcttggctcattgcagcctccgcctcccgtattcaagcgattctcctgcctcagcctcccgaggagctgagattacaggcatgccacgcctggctaattttttttgtacttttagtagagaccgggtttctccatgttggtcaggccggtcaggaactcccgacctcaggtaatccgcccacctcggcctcccaaagtgttgggattacaggcgtgaaccaccgcgcccggccatattaactctctaatggtgcttcagtttatttttgaacagggtaaagtaggaactggggaccccacagaccgcagctccttccacgcaggagacccgcacaaccagtcggagtctttccctgatgacctcacaacctggggaagatgacgggctgcgggcgcagagctgcgcaaagagggctacaggctggggctaaagccgctgtgctgaaacggtaaaggacgccccggggtccctgcaccggaggagagtgagggctgagctgcggggcactcaggctcacaagaccgtcccgccaccgccatttctggcgcgtcccaaagaggcctcccccgtctccaaacgccctgccccgcacactcaccttttctcggcttcaggaatgtcctggagtctatgaatcttccagcaccatcagttcaccgcgtgatggaggctgaggctgtggccgaatcaccgagacccttggaaagaagacacagggcagtgaagagctaacctcgagctctggctggagcaagagacaaaggccccgccaggtaccgggagccaccccttcctctctgactgtgaacctgattggacagttcccaccccagcgcccttaatggatagagctccaggctccgcgccctcaggccttgagtgacagaagacgcgatcagaccttgcactgaataccgcgagcgtgacaggctcttggctccagtcatttcaggaagggctatctctgggttgggcccacatgtgcccaggggttattttaaatcttgtgtataaggttatgtccatttataaattttattcatacacacatatatgttgttcacaaatggaaacactataataacaattattttaaaatttaacatttcataagctttctggcctttagtcttttgagtaggcaacctgggattttaaaagaaaaacagggccgggagtggtggcaccaagaagaaaaaaagtttatagaatctcaaaaagaaataagaaaaaggcggggcatggtggctcacgcctgtaattccggcactttgggagaccgaggcgggcagatcacctgaggtcgggagttcgacaccagcctggccaacatggtgaaaccccgtctctactaaaaatacaaaaattagccaggcgtggtggcaggcgccttaatcccagctacttgggaggcagaagcaggagaatcgtttgaacccgggaggcggaggttgcagtgagccgagatcgagccattgcactcaagcctgggggacaagagtgagacttctctcaaaaaaaaaaaaaaaaagaaaaagaaaaaaaactctttaacttaaacacacacacaacttcagagaaaacgtatctgagaatgtgaaacacccagcattcatagcctggctgattactgtcagtatctcccctttactaagccggtctttaaatgctggattagatggctgttgtataaatcctcagatatcacttaaaaaaaaaaatcacagggcatagagaaaagacaggaaatatgtcccacttgaaggagcaaaataatatccagaaattgaatcttaagaaatgaagtttttgcatatctgataaagaattcaaaatatttggccgggcacggtggctcatgcctgtaatcccagcactttgggaggctgaggcaggtggatcacaaggtcaggagttcgagaccagcctggccaatgtggtgaaacctggtctctactaaaaatacaaaataataggccgggcgtggtggctcacgcctgtaattccagcactttgggaggccaaggtgggcagatcacgaggtcaggagatcgagaccatcctgactaatatggtgaaacctcgtctctactgaaaaaaaatacaaaaaattagccgggtgtggtggcaggcgcctgtagtcccagctacttggagggtgaggcaggagaatggcgtgaacctgggaggtggagcttgcagtgagcccagatcgcaccaccgcactccagcctgggcgacagagcgagacttccatctcaaaataaataaataaataataatcatcatcatcttagaatgctcaatgaacaaaaataaaacacaaatagacaactaaatgagatttagaaataatgagcgaaatatcaaagatataaaaacttttttaaatttttaattaatttattttttttagatggactctcgctctgttgcccaggctggagtgcaatggtgcgatctcagctcactgcaacctccgcttcccgggttcaagtgattctcctgcctcagcctcccgagtagctgggattacaggcacctgccactgcgcctggcaatttttgtatttttagtagagaaagggtttcaccatcttggccaggctggtcttgaactcctgaccttgtgatccacctgccacggcctcccaaagtgctgggattacaggcatgagccaccatgcccagccagcaggcaggttttcttgtagacggaatgaaagcaaggaaagctggaatgagctcagccctatcaggcaccctaaaggctgcctggggttgcctgcaaggccatctagccttctgcttcctggcaggctggtcaagcacttattctggtctctttgagactttgatttcctggaaggagagggccctcctttccactggactgagtggccagggccatccagcttcccaccctccactaacaaccatggggtgccctcctgagcacacactgcccaattatggcccttcttaggcaggagctcatttgtcttacactttcagcctgctggggcttagaagttatcagtgctgttattaagatagagaaatgaggggggaaagttgctttaaaaatcttccataatcttattatggaaatcaccagcgcagatgccagcacaggtggggctcctgaggatgctgggggagagttcccagcctgtcctggcagccggtccttgccagggatggctcatgccccagctccagagagaagcaggtagacatctctgcaaggagctgcgggctgcagctcaggacagccaagccccactggtggtggagtggggctacatcccatcaggctgtgtctcttccacagcagacccttggagccaggaggtgatttacagtgtgtgcaaggcagtaagctccatcagctgcatggccttcagcactcacttcaacattcacttcaactctgatatctcgccacagaagcagtggggactggcctgtgcagaagccctgaaagtgggacagagcctcatgtggccgggcggcaggtggggcaaggaggggttctgagtcctcggtgctggttggcctgtctgcccatctgagcactgctccctgggagtgtgctctgcaggcctcctaaaggagggctgtgagctcatcactgaggccctgagcacctccttgctcctccccactacattaccggtgactatgctgaggtgggcctcgagcaccctctgggctgtgtcatcaaacgtctttggacctggcctggcaaatgagggatggcaaatgaggagtctggagtttcattgtcaccctctatggtagcaggaaatgggagagtccaggcctgcaggactggaaccctatcgagggagttaagaggctgttcacttcccctccgggccccatgtggaggagtggatggagtctagggagacactggggagtcacttgttttgtctgggcttcccctagttccaccctttgttaaccatttccttgggagagttcaggaaactcctgtgctctagtgaggcgggacctcccctcacagggtattggtgaggaggcgttctgagactctgagtgagaagctaccacagtgcctgacaagtacctgtgggagctgtcatcctctgtaaccaccatgtggccttgtagtgttcaggctgcctgtcctgtcctaaggcttggtggggcttttggggggtcagctgctttagggtcccactctctcctcaaagtggctgtttttgtgtttgtttgtttatgggttttaaaacacttaatatttcatttatagtagtttcaggcttgcatgtgtgtatttgtatagattttattagaaagaaaaggacttaagacaacatttttagaaggtctccgtggcgcatagagttccatgtcacaacagctgatgttgacctccttctgttgcctttgtgcaaagtataaatagaaagtgcaagccagaggtgccgaggctcagtgtctagagctgagccacttgggcttgcttgctggcctgcagccacgtggactctgggtgtgaggtgttgcccatcctggatcaacagcccccacccctctccccaggtcctgagtaaccaacacaaggcagtgctaatgagcaggtgagaaatggacatcgagcaccccaataccacccaggaagatttgaatggcatttggactcaggctgtgtgggggtaggggctgtgtgggggtaggggcttgtcatggtgccacccacagatgcccctgccctatgctgcttccccagcagccagctgtccatggccctgagcctgtcacaccatgcctgctacctcacgctgttcatgtttgatgaaaaccatcccaagatggtgctgctggatgtgagtgctggaaagggggcagcaccattgtcctaggagattatgagctgaccagatccctactgactgccccccaggacaagtgggggctggtgctgcattgaatgatgccccccccaggagatgtgtttgcattggctcaatgaatatacaatgcagaggcataaatgaagacatgtgaatggtgtatgtggacatcagcttgcagctgggaaaaaggtgcctctcaggtccctcattcttcccagcaactgtagaatgtgtccatgccaatgagtgtatagatctgtccttcttaacttgtacacaactccaggtcagttccgagtgaatgacatgcagatgggatttctcgagtcatttgtatgcttcatattatggctgctgcttttgctgccactacccccagacccaacctggtttgaagttcaggctttaagtaaaaaagatcgagggcctccttgtgttctgggatggaaagtcagagacctgtggtagggctagggttttgggtacactttagttttgtggcaggatgagaactgcagtgattataattgtgattggcctggcctgattgtaactctgggtgacagggagggagtcagcagtggtggtcccccagacatccatgtgcctaggcctggcctgcctgccctcagtaccagcaaaaaggcaacaccacaggctctgacttgcctccctactccctgcaccccagatgggaataccttggaggctacaatctgaatgtattattctccctgtcttaaccagacctccctaacacacactgagggtagagtaggtttggggcctggggagaaccagagctgaatcatgaatcccgggggaatgttaaagatacaggagtggttgtcaccgctctgttgagcccagcttcctacctggtcctggccacacagccccttaaacggagactagctctgggggtagttagggaccctataggcccaggctgctctctgtccccacctgccggtgctacttctcttgcctactgtcagagccctaacatggagaaggaggttgccaccctgtgagcctgagggagctgtgtctgactggggcttctgcctgggattttgcaaaaagatacctatgaatatggtttgcctagatatcttgtttttggttttttgtttttttttttttttggagacggagtcttgctctgtgcccaggctggagtgcaatggcgtgatctcagctcactgcaagctctgcctccttgggttcacgccattctcctgcctcagcctccccagtagctgggactacaggtgcctgccaccacgcccggctaatttttttttttttttttgtatttttagtagagacggggtttcactgtgttagccaggatggtctcgatctcctgacctcgtgatccgcctgcccagcctcccaaagtgctgggattataggtgtgagccaccgcgcccggccgatatcttgttttaaagggagtggccataagctagcaagtggagcatccccaccactgattaataacattttcttgtttttaacccatcatattttcatatcacattagaataaagtaagtttttataaactactgctccagcctcacccgtgtgttttgtaacccagtctgatttgattgtgaggactgttgtcagaaatgttgctaagagagaaatatgtataaattagatcatatttaaggttatgcttataatgccacttgagtgggaagtaagagtgtggagtcacagggactcagctggggtttgcccacaccacttactaggctcatgaaagtgtggcacaggtgaatatcacctgtcattggtgacagaagaaaaaaggctaaggccaggcgcagtgcctcaagcctgtaatcccagcactttgggaggtcgtggtgggctgatcacctcgatcagtagttcaagaccagcctggccaacatagtgaaatcctgtctctactaaaaatacaaaaattagcttggcatggtggtgtgagcctgtaatcccagctacttgggaggctgaggcaggaaaactgcttgaaccccagagatggagttgtagtgagccaagatcatgccactgcactccaacctgggcaacagagcaagcctacatctaagaaagaaagagagagaaaggaaggaaggaaggaaggaaggaaggaaggaaggaaggaaggaaggaaggaaggaagggagagagaaaggaatggaaaggaaaggaaaagaaaaaaagaaaagaaaaaatcctggagggaaggccaggggaggagagatgctaggctgtggggctgagcactgggcatgctggacctgttaggtcactgaacatctaactgccaaggcacttgcccttgtcaggtcagtcgaggtaaggaaattaggcagcactctccagaagtcccactgtactgggagaatggaggagggtctacaacttgccattctagggtaggttttagagcaagctgggctctcttggagagctaatgagatgggaggaaggcaatattccagacctgagggacagagcctgtgaagtaagagggggtatgtggaggtggcctgaccctataagagggggagttcacagttattatagctggtggctgttgctcagccatccctctccagagcagacacacacacacacacacacacacacacacacacacacgtgtatatttcactctgtcacccaggctggaatgcagtgactgaatcatgggttactgcagcctcaacctcttaggcttaagtgatctttccacctcagcctctcaagcagctgggactataggcatgcaacaccacacctggccaattagcctcatgtatagctaaatgccctttggagtgtttggagagtccttcatgtcttagaaattctgaaaaaacaaacaaacaaaaatattccaatcctaatgtctgttagttcctctgagccaagtgggaaaagatgtccttcaccttgaagttttaagtgatacccaaggatagccaccagtgtcttggccatggaagcctcctgcgtgcttcctgcccccagtttgatttgcagcctcatggttgtgttgtcctaaacatgctttcctctggccttgtccagtgaatatggttcacgtggggaacaccacttcttgagggcgacaccatgtaaagctgagaatggattgggtttaggtacattgtaactccttgtcacctgagaggcccatttttcctgattgattccttaagtgtattagtgctgtcagacacctttggacaaatcaaataacaaggggctgtagttttataaaggaaacaaagtctttaaatatcaaatcctctttttctcctccatgttttttttaggtgaaatatttcaatttttcttttctttctttctttttttttttgagacagagtttcgctcttgttttctaggctggagtgcggtggcatgatctcagctcactgcaacctctgcctcctgggtttaagtgattctcctgcctcaacctcccgagtagctggggttacgggcacgtgccaccatgccgggctaattttgtatttttagtagagacggggtttcaccatgttggccaggctggtctcaaactcctgacctcaggtgatatgcccacctaggcctaccaaagtactgggattataggcatgacccaccgtgcccggcctcaatttttctttaaaaatgggtaaatagtggtatgtcagcaggcttagtgtgagaattggcatgtggctgggagtggtggttcatgcctgtaatcccagcactatgggagggtgaggcaggcagataatttgaggtcaggagtttgagaccagactggccaacatggtgaaaccccatctctaccataaaatacaataattagccaggcatgatggtgggcacctgtagccccagctacttgggaggcggaggtaggagaatcgcttgaacccaggaggcagaggttgcagtgagcccagactgcaccactgcaccgcagcctgggctacacagtcagtcagaccctgtctcaaaaaaaaaaaaaaaaaagagagagagagagaattggcatgagctaggtgatggttcctgtgtggatgggcagtttttcaaaatagaaaaccaagtctcaccgagttgcaggagccacttttctttttttttttttttaatctatttttatttttttgagacagagttttacttttgtcgcccgggctggagtgtagtggtgtgatctcggctcactgcaacctccgactcccggtttcaagcgattctcctgtctcagcctcccgagtagctgagattacaggtgcccaccaccatgcccagctaatttttgtacttttagtaaagacaaggtttcaccatgttggcaagggtggtctcaaactcctgacctgaggcgattcccgcccaccttggcctcccaaaatgctggaattacaggtgtgagccaccgcacccagcccacactcacctttcttcacatacccccacccccaaggtctttcactttttttctgtgcttgaaatttttttaacatacatattatttttaaaaataaattatataacacacacacacactcagaggtctcactctgtcacccaggctggagtgcagtggctgaatcatgggttactgcactctcaaactcttaggctcaagtgatttttccacctcagcctctcaagtagctgggactataggcatgcaataccacacctggccaattttaaaatttttttgtagagactgaggcttaaaatgttgcccagactggtcttaaactcctgggcttaagtgatcatttcaccttggcctgcctcccaaagtgtttggataacaggtgtgagccatcaagcccaggcaaaaaaaaaaatttttttttttttttgatacagagtctcgctctattgctcaggctcgagtgcagctgcacgatctcggctcaccacaacctctgcctcccgggttcaagcaattctcctgtctcagcctcccaagtagctgggactacaggggcctgccaccatgcccagctaatttttgtatttttagtagagacggtgtttcactatgttggccaggctggtctcaaactcctgactttgtgatccgcccacctcagcctcccaaagtgctgggattacagacgtgagccaccatgcccggcctcaaaaatatatattttaaaatttttatttctttttgagacgaagtttttcccttgttgcccaggctggagtgcaatggcatgatctgggctcactgcaacctgtgccttccaggttcaagcgattgtcctgcctcagcctcctcagtagctgggattacaagcatgtgccaccacgcccggctattttttgtatttttagtagaggtggggtttcaccatgttgcccagggtggtcttgaactcctgacctcaggtgatccacccgcctcggcctccaaaagcgctgggattacaggcgtgagccgctgcagctggccctcaaaaatattttttaaagaactgttacaaccaaataatgagctatgatgtgccactgcactccagcctgggcaccagagtgagaccttgtctccaaaaacaaaacacaaaaacttataacaaaattgaactaataaggttgtgtcatctgtgtcccctccctaccctccaagctatcactgttaaatataatgggtattgagaaaactgttagatattattaaagaattcctatgtatcctccagttgaaaaggtgttctgatgtggctcaagtgctttctgacctctacctccagggtctaaactagcaaatcaaatcaggacacctacagaaaaccgttggccattttcttttctttctttcttttttttttttttgagacggagtttcactcttgttgcccaggctggagtgcaatggcgcgatctcggctcactgcaacctccgtctcccaggttcaagcaattctcctgcctcagcctcctgagtagctgggattacaggcgtgcaccaccacgcctggctaattgtatttttagtagagacggggtttctccatgttgaggctggtcttgaactcctgaccccaggtgatccgcccgcctcggcctcccaaagtgctgggattacaggcgtgagccacagcgcccagcctggccattttcaaatagaaaatgaaacacacccgttaatgaaagtaatccagtgattttcaaaaggagaagtcagactgagatgcagcgcagtcagggcacaattaccccaaggatagacgcttcacacaaaatgcctgaggagcctttctaagatgagcacatttggccaacgtaattcatgcttacccattctcagccccctctgcccacctcccccccgccccattcctaatggccatcccacgatgtggtcagcagtgtggtacagcatggtgagagaggggctcagggatgggatgaaggtttttcctgcattatcaaaatgattaaaaagttgttaaaaaggtgtccaaattttctttttaccctaaaataactactcagatgcattatacaagtagacccaggtaagggaaagagcaagcgcatttcaagcctcagctcacttcttaattagctgtaattccctgagcaggtgaccctgcctacttcagcctgtttccctgcccataaaatgcactaatgctggggaagccgcgctgggaggtgggtcctgaagctttatccaatcagtggcgctggcgcgggaaccgcccaatcaggcgcggagttggagaggagggcgtggcctccggcatttggcgggccctttgtctcgctcctgccagagttttagttgcctgtctctgctattctgcgtcctccacctcgggagccccaggtgactttgtcacagccggtgggtgtgcgggttgagcatcccgagatgggagagcggcctgtgaaaccggctggaccggcctccccacagtccgctcctgggtcgccgacctgagtccccgctggcacagctccgctccaggccactctggccgcaagatggcggctggactcgcagccaggaccacagcgtcccgccagtttctgcgcggcgccagtccggggctctctgggcagctctgcacccgcaatcccgagtatttcccgggttgttcagggaagacaggcgggtcatcggcagaatccccactcggtgtatgcgttggaggggctgctgcccgtggggtcttaagtcttttctgattattattatttttttgtgagacggagtctcgcttttgtctccaggctggagtgcagtggcatgatctcggctcactgcaacctccgcctcctgggctcaagcgattctcgagcctcagtctcccgaatatctgggattacaggcacccgccaccatgcccggctaattttttgtatttttagtaaagacagggtttcactatgttggccaggctggtcttgaactcctgacctcagatggtccgcccccctcggcctccgaaagtgctgggattacaggcgtgagccaccgcgcccggccacaaagaaatttttccgccgtccttttcggccacaaataaatttttccgccgtacttttcgtatttattaaattttctcattagagcctattattgattgtaatgcatttttctgtgaaattttgctgccattcattgaatgccaatgattcagaatgcctgctctgcaagagtacacacagctaaaaactgtagatatctaaagaattatttttaatatctatgttgtattcagcatattatgcgttaaaatctctcttggccgggcgcggtggctcacccctgtaatcccagcactttgggtggccaaggcgggtggatcacctgaggtcaggagaccagcctggccaacatggtgaaactccttctctactaaaagaaaaatacaaaaattagccaggcttggtggtgggtgcctgtaatcccagctactcgggaggctgaggcaggagaatcgctggaattcggtaggctgaggttgcagtgagccaagatcacgccactgcactccagtatgggttacaagagcgagactccgtctcaaaaaaataaataaataaaatctctcttatttttatttctacattagtgtttcttttcgagggggtatgtttttttagatcagttaattgtatttttgctttcaaagcttgatattatgaattgaatgataattttcaactctgtacaattttagacaatgtgatgcttaatttatatatgaattagccgtatgtcatctatagaaatatcgatgtgtttttcatctgtgttgccactacttcgtttatgacatactctttccatggttttcaatgattattctgtctaggtgagtagtcgggaaaataatcctaaattcacaatctacttatattttgaatctgtataattatgtgagaagaacactctttatttgaaggtaatgtttgaaaaatgtcgtaatgtctcttatgtagtctttaatttttttttttgagactgagtctctgtcgcccaggctggagtgcagtggcgcgatcttggcgggactccatctcaaaaaaaaaaaaaaagagcttctgcacagcaaaagaaactatcaacagagtaaacagataacatacagcatgggagaaaatttttgcaaactatgcatccgtcgaaggtctaatgtctagcatctataagaacttaaacaaatttacagtagaaaaacaacaaccccggctgtgcgtggtggctcatgcctgtaattccagcactttgggaggtcgagacgtttggatcacttgaggtcaggagttcaagaccagcctggccaacatggcgaaaccctgtctctactaaaagtacaaaaattagctggctgtggtggcatatgcctataatcccagctactggggaggctgaggcaggagaatcgcttgaacccaggaggcggagattgcagtgaaccaagagtgcaccactgcactccagcctgtgtcaaagagtaagactctatctcaaaaaaaaaaaaaaaagaaaaacaccaactccataaaaaagtggatgaaatagggccaggctcagtggctcatgcctgtaattccagcactttgggaggccaaggtgggtagatcacttgaggtcaggagttcaagatcagcctagccaacatggtaaaaccccatctctattaaaaatacaaaatatcgctgggcacagtggctcatgcctgtaatctcagcactttgggaggtcaaggtgggcggaccacctgaggttggcagttcgagaccagcctgaccaacatggagaaaccccatctctactaaaaatacaattagccgggcatggtggtgcatgtttgtaatcccagctactctggagactgaggcaggagaatcacttgaacccaggaggcagaggttgtggtgagccaagagtgcaccattgcactccagcctgggcagcaagagcgaaactccatctcatgatggtggacacctgtaatcccagctactagggaggctgaggcaagagaattccttgaacctgggaggcagaggttgcagtgagctgggatccagcctgggtaacagagcaagactgcctctccaaaaaaaaaaaaaaaaaagtgggggaaggacatgaacagacgtgtatcaacaatcatatgaaaataagcgcaacaccactgattgttaaataaatgcaaatcaaaaccacaatgagataccatctcatgcctgttagaaaggctatttttaataagttacagaaataacagatgctggcgaggttgtggagaaaaagaaatggttatatactgttggtgggagtgtaaattactttagccattgttgaagacagtgtgttgattttttttttttttctcctgagacagagttttgctcttgttgcccaatctggagtgcaatcacacgatctcagctcactacaacctccacctcccgggtttaagcgattctcctgcctcagccccctgagtagctgggattacaggaacgtgccaccacacccagctaatttttgtagttttagtagagacagggtttcgcctcattggccaggctggtctcaaattcctgaccttaggtgatctgcccgccttggcctcctaaagtgtggggattacaggtgtgaactgccatgcccagcctagtgtgatgaggaatcctattactgtatatacccacaggaatataaattattctattataaatacacatgcacatgtatgttcactgcagcaccatccaccacagcaaacacatggactcaacctaaatttccatcaatgatacactggacaaagaaaaatgtacatatataccatgaaatactatggagtcataagaaaaatgagatcatgccccttgcagagatctgcatggagctggaggccattatccttagcaaactaacacaggaacagaaaaccaaatactacttgttctcacttatgagtgacaagtaaataatgagaacacggacacgggggggaatgacacactggggtctttcaaaaagtggaaggtgggaagagaggatcaggagaaataatggtactaagcttaatacctgggttattaaataatctatacaaccccatgacacaagtttacctatgtaacaaacctgcacttgtaccctaacacttaaaagtttttaaaaagacctatttgtaccttttaaagaggaatcagccagtaatttcaaagatgattttgtttataaaacataatcttccacttgtccagtaaatgctcttcatttatttatttattggagacagacactgtctcccaggctggagtgcagtggtgcagtctcagctcactgcaacctttgcctcccaggttctagcgattctcctgcctcagcctcccgagtagctgggattacaggcctatgccaccacacctggctaattttttattgttattagagacgagatttcaccatgttggccaggctggtcttgaactcttgacctcaggtgatccacctccctcagcttcccaaagtgctgggattacaggcttgagccaccacgctcagccagaagctctttaacttaattagatcccatttgttaatttttccttttgttgcaattgctttggcatctttgccatgaagtctttgcctgcgcctgtgtcctgaatggtactgcctaggttgtctttcagagtttttatagtttgggttttacatttaagtctttaatccatcttgagttattttttgtgtatggtgtaaggaagggatccaggttcaatttcctgcatatgactagccagttctcccagcacaatttattgcaaattctttccccattgcttctttttgtcagctttgtcaaaggtcagatggttgcaggtgtgcagcttgatttctggccctctattctgttccattgatctatgtttctgttcttgtactagtaccatgctgttttggtgctgtagccctgtagtatagctggaagttgagtagcgtgatgcctccagctttgttatttttgcttaagattgccttggctattcaggcttttttggtttcatataaattttgaaataattactttaaattctatgagaatgtcagcggttgtttattgggaatagcattgaatatataaattgcttttggcagtatggacattttaatgatattgattctttctattcatgagcatggaatgtgttttgtttgtgtcatttctgatttctttgagcagcagtttgtagttctccttgagatctttcacctccctagttaggtgtattcctagatattttattctttttgtggcaactgtgaatgtgagtttgttcatgatttggctctcggcttgagtgttgtttgtgtataggaatgctggtaatttttgcacattgattttgcattctgagactttgccaaagttgtttatcagcttaaggagcttttgagctgagactatggggttttctatatataggatcatgtaatctgcaaacaagaatagtttgatttcctttcttcgtatttggatgccctttctttctttctcttgcctgattacccagaccagaacttccagtactatgttgaataggaatgatgagagacgacattcttgtctcattctggttttcaaggagaatgcttctagctttcgcccattcagtataatgttggctgtgggtatgtcatagatggctcttatcattttgaggtgtcttttttttctatacctagtttattgagagtttttaacatgaatagatgttgaactgtaatgaaagtcttttctgcatctattgaaataatcatgtggtttttgcccctagttctgtttctgtaatgaatcatatttattgatttggatatgttgaaccaaacttgcatcccagagatgaagcctacctgatcatggtggataagttttttgatttgctgctgaatttactttgctagtattttgttgaagatttttacatcaatgttcatcaaggatgttgacatgaagctttcttttttgttgtatctttttcaggttttcatgtcaagatggttggtcctggcctcatagaatgagtttagggagagtcccttctcctacattttttggaatagtttcagtaggaacagtaccagctcttctttgtacatctgggagaattcagctgtgagtccacctggtcctggacttttattgattggtaggctatttattactgcctcaatttcagaactcactattgttctgttcagggattcagtttcttcctggttcagtcttgatagggtgtatgcttccagaaatttttccatttcttctagattttctagttcatgtgcatcgacttgttcataatattctctgatggttctcttctctgaggtcagtggtaatatcccccttattgtttctgattatgtttatttgaatcttctctctcttcttattagtctagctagtggtctttttagttattttttccaaaaaaatacttcctggatttgttggtcttttgaatgtgttttcatgtcactgtcttgttcagtgcagctctgattttgattatttcttgttttcttctagctttgggatttgtttgcttttggttttctagttcttttatttatttattttattgtatttatttattttttgagatggagtctcgctctgttgcccaggctggagtgcagtggtgcaatctcggctcactgcaacctccgcctcctaggttaaagcgattctcctgcctcagtttcccaagtagctgggatggactacagggatgtgccaccacacctggctaattttttgtatttttagtagagatggggtttcaccatgttagccaggatggtctcgatctcctgaccttgtgatccgcccgcctcggcctcccaaagtgctaggtttacaggcgtgagccaccgtgcctggccttgttctctagatcttttagttgtgatgttatgttgttaacttgagatcttcctaactttttgatgtgaggctttagtgtcagaatgtagtgagatcagatgtattaagtaaggccaggcgtggtggccgattcctgcaatccctacacttctggaggccaacacgggagaatcacttgagcccaggagtttgagaccagactgggaaacatgtggaaaacttgtctgtaccgaaaatacaaaaattagccaggtgtgccagcacacacctgtgatttcagctacttgggaggctgaggtgggaggatcatctaagtctggggaggttgaggctgcagtaagccatgatggtgccactgcactccagcctgggtgacagagtgagaccctgtcaaaaacaaacaagcaagcaacagatattttatgcccttctctgggtaggaagcaaaatgaacagaactcagcattttaaaatttaaattttatttttgaattttaatctatttatttatgtattttgagatcaggttatgaaactggctaatttttgtattttgggttgagatgatgttttaccatgttgcccaggatggtctcgaactcctgggatgaagcgatgcacctgccttggcctcctaaagtactgggattacaggcgtgattcattgccaggttgcaattttttttttaatctcttgtctttctgagagtttcgtggcagagagtttggttcatttaagttcattctaaatagacatttaggacgttaacttctggcctcatggactctgaggttacaagtcccctggtctatcacaggaccatacacataagaaataaaaaaaaatcggctgggcgtggtggctcacgcctgtaatcccaacactttgggagactgaggcggctggatcacctgaggtcaggagtttgagaccagcctggccaacatggcgaaaccccgtgtctactaacaataaaaaattagccgggcgaggtggtgcgtgcctgtaataccagttcctcaggaggttgaggtactagaatcgcttgaacccgggaggcggagatggcagtgagccaagattgccccactgcactctagcctgggtgacaaagcaagactccgtctcaaaaaaaaaaaaaaaagactccaatcaaaaagcaaataagtaaataaacaaacataacgtttataataagtaattgtgttacaaagaaatatagttatgtcccctaaaccaaggtctcacagaaaaggaagcctgtgcacagactgggtcaactgtgtcttctctactgtccctacctcaaagttggcttcttccttgttgcctagaaaatcgtcgccctgactgggtatgattgttctttgatcagtatatgcatatatatgtattttttcattctttcctggctgattattgcgtgggtggttgtttggcgcctcctagcggccggctagcagtacaggcctcctccagaggccgcttgggctgacggcacggcttgtggcccacaggggcggccacctttctagagttctcttgtcctctggagctccagtggcagctgccgagggagggacagcccccgctgtgagctgagcagagctcgggagtcctgcagacttcagcagaacagtcccgatggtgccagagctctggcgcgtcccttgtgagtcatagctctggcgtgtagggctgtggaggggaggctgttaccgtgctcccggcatgagcttagtgtggggctgcccgggctggtccccagctcaccgcagctgcggaggcccgaccctcggaacccaccaggcatgatgcagggggccggggacaccccccaggcccggttgcgggcccatgtgtgtcctggccgtttgaggctctggccgatttcttttcccaagtccccatggagaatcagggaccgtcctgtgccatcttccgagagcctggaagggtccgcccgtgggctttccgagcgccgaaggggccacatgctgctctgagggtgccgcaggttcgtggggctcccttgcttggtgtccaccccctctggtttcctcctcttcccaccctgcgggtggctcgtcgccctggctgggacgccgctgtgggagcgtggtgggatggctgaggcgcgggcgtcagagggtgtggcccggcagcccccgtttcaggggtggctgtgtggtctggaagtggcggtccaggtcctgggcctctcccactcagcagcggggaggaggggtcggcggggagtaggggccggtcgcccccccttgagctcttccccgtcttagtggaccagcagacagtgtgggagagcgctgggaaggaaggttggcggagttatactccagacggacgggctcaggccccgcgcgccacactcggccacacttggcgcgtagtgtggacccggtgggcctctgccctcgccaccggctggcttctctgtccagccgctgggtcgaccagatgtcagccccaaggttagggtttggcctccagcttgagatgtttaagacggactagatagctctcgcccgcggcagtaccgcttaggtccagcagagggtgcgattacggctcacgcgccctccacctgcccggactcacccaggtcatcctcccttttcttttttcttttcttttctctcttctcttctcttctcttctcttctcttctcttctcttctcttctcttctcttctcttctcttctcttctctttctctttctgtctgtttttctttctttgagttttcgctcttgttgcccaggctggggtgcaatggggcaatctcggcttactgcaacctccacctcccgagttcaagcgattctcccgcctcagcctcctgagtagctgggattacaggcgtgcgccaccacacccagctaattttgtatttgtagtagagatggggtctccatgttggtcaggctggtctggaactcccgacctcaggtgattcgtccaccttggcctcccaaagcactgggattacaggtgtgagccaccatgcccggccccatcctcctgtttctgcctccagagtagctgaggctcgggatctttctgggtttttttttctttttttctagccccactttgagtttgtttccacggtacattgagttactattgttttgttttgttttgttttctctcttaagcaccttcctgcacactgaagttgctgttttaaatttcttctttcatacgtgtgtgtgtgtgtgtgtgtgtgtgtatgtttttttaaatgaggtcttcttagtcacccaggctgaagtgcaggtgtgtgatcacagctcactgcagcctggacctccttgggctcaggggatcctccgtcttagttctcccagtagctggtactacagtcacgtaccaccacactggctctttattttgcattttttactttttatttttgtagaaatgaggttctgccatgtttctcagactggtctcgaactcctgtgatcaagcaatccaccagccttgacctcccaaagtgctgggattacaggcatgcaccatcctgcctggctggctggctatctatctatctatctgtctatcatctctctctgtctgtccagctctgtctatctggctggctctgtctctgtctttctgatctatctatctatcatcttttttttttttttttttttttttttgagacaatctcacactgtcacccaggctggagtgcagtggcatgatctcagctcactgcaacctccacctcctgggttcaagtgattctcctgcctcagcctcccgagtagctgggactacaggtgtgcgccaccacgcccagctaatttttgtgtttttagtagagatggggttttacaatgttggccaggatgatctcgatctcttgaccttgtgatccgcccacctcagcctcccaaagttctgggattacaggcgtgagccactggcacccagcctgtatcatctttttagtagagatgtgatcttgctatgttgtccatgctctggatatatatttcttttttaactttaattattattttttaatagagatgctgtctcaccatgttggccccggatagtcttggactcctgggttccaggtatcctccgtggcctccaaaagtgctgggattacaggtgtgagccactgtgcacggtctggtcatgtttttgatgtgttgattctttccagtccagatgcataatctcatgtctgaacattcctgctggtgtcattatgacatatgactttacccagcaccagagtgatttggtgcccctgccctggcctagcccatggaagggattgtgacatatccctggacccagtaccgaggtggtgtgactattctactgccttggcactacccacaggggacattttgacatcactacatcttgtacccaggtggtgtgaatcttctctccagccttggctcttccacaggggacattgtgtcatatggctgggccccacacataggttatatgactctcctgcctgtgccctgcccatgtgggccactgtgacttttgctgagtccaacacccaggtgatgtaactctactgcctaggtcctgcctacagaagatcttgtgacatatccctgcacccatcacacaggtaatatggctctcttctcctgcctggctcctgcttacagaagggattgtgatgtattactgggctcagcacctagctcacatgactctctgcctctttctttctaggttctgcccaaagaggatattgtgacatgtcactgggcctaatactatgctgacatactcttttttttttttttttttttttttattgatcattcttgggtgtttctcgcagagggggatttggcagggtcataggacaatagtggagggaaggtcagcagataaacaagtgaacaaaggtctctggttttcctaggcagaggaccctgtggccttccgcagtgtttgtgtccctgggtacttgagattagggagtggtgatgactcttaacgagcatgctgccttcaagcatctgtttaacaaagcacatcttgcaccgcccttaatccatttaaccctgagtggacacagcacatgtttcagagagcacagagttgggggtaaggtcatagatcaacaggatcccaaggcagaagaatttttcttagtacagagcaaaatgaaaagtctcccatgtctaattctttctacacagacacagcaaccatctgatttctcaatcttttccccacctttcccccttttctattccacaaaaccgccattgtcgtcatggcccattctcaatgagctgttgggtacacctcccagacggggtggtggccgggcagaggggctcctcacttcccagtaggggcggccgggcagaggcgcccctcacctcccggacggggcggctggcctggcgggggctgacccccacctccctcccggacagtgtggctgctgggcggagacgctcctcacctcccagacggggtggctgccgggcggaggggctcctcacttctcagacggggaggctgccgggcggaggggctcctcacttctcagacggggcggttgccaggcagagggtctcctcacttctcagacagggcggccgggcagagacgctcctcacctcccagacggggtcgcggccgggcagaggcgctcctcacatcctagacgggatgacggctgggcagagacgctcctcactttccagactgggcagccaggcagaggggctcctcacatcccagacgatgggcggccaggcagagatgcgcctctcttcccagacggtgtggcggccaggcagaggctgcaatctctgcactttgggaggccaaggcaggcggctgggaggtggaggttgcagcgagccgagatcacgccactgcactccagcctgggcaccattgagcactgagtgaacgagactctgtctgcaatcccggcacctcgggaggccgagggtggcggatcactggcggttaggagctggagaccagcccggccaacacagcgaaaccccgtctccaccaaaaaaacacgaaaactagtcaggcgtggcggcacgcgcctggaatcgcaggcactcggcaggctgaggcaggagaatcaggcagggaggttgcagtgagccgagatggcagcagtctatgctgacatactcttatgccttgacactgcccctagaaggcatggtgattgattgctgggcccagaaccaatgtgatgtgagtctcctgcctggaccctgcctacaaggtgcattgtgacatatctctgggacctttaactattttatgtgactctcctctcttacctggatgttgcccaaaaagagattgtgacataaatttgggcccaacacataggtgatgtgactctcctctcctgcctcttccttgcccactgaagagtgaatgacttattgctgaattcagcacacaagtgatgggattcttctgcctgctcacagaagtcattgtgacatatatctgggcctatcactgaggttatgtgactcttttcttcctggaacctgtccacagtggggagtgtcacatgttgcttggctcagaacctacatgatgtgattctcttcttatgcctgggccctgcccactggagtgattttgacatgtagctgggcccagccccaaggttatgtgactccacacatcttcctgagccctacccacagggggcattgtgtcatatctctgagaccttcaatgaggtgatgcgactcttttgtttgggccctcttctcaggatattgtgacattgctgagcccagcatctaggtgatgtgactcttctctactgtttggtctctacccaaaaagggattgtgacatatcactctgtcaagaacctagaagaggtgactctcctctccagcctgggacctccatacagtgtgtattgagacatatcactgggtccaacacctagataacgcaactctcctgcatggggcctgcccataggggtattatgagccatctttctattaatcacctaggtgatgtgacactcctcttttgcctgggccctgccaaaaaagtattgttacatatcactgagcccagcagctaggtgatatgactcttctctcatgcatgggccctgcaaactggggtgtttgttacatatagctgggcccagcccctaggtcatgcgattcttttttttcctgagccctacccacagtgaaaactttgacatatttttgggcccatcatttatgtgatgtgactcttgcatgggccctccccacaaggggtagggtgacatattgctgaacccagtacgtaggtgatgtgactctcctttatggattgggctttgcccaagcagggattgtgatgtatttctgggcccaccacctagctgttgtgattcttctcttctgcctaagccctgcatacattgtgtattgtgacatatacctggattcagcacccaggtgatgcaactttatgtcatgagaactgcctacagaagtattatgacatatctctttttctttttcttttttttgagacagaattcgctcttgttgcccaggctggagtgcaatggtgtgatcttggctcacggcaaactccacctcccgggttcaagtgattctcctgcctcagcctcccgagtagctgggattacaggcatgtgccaccatgcccagctaattttttatttttttttagtagagacggggtttctccatgctggtcaggctggtctcaaactcccagcctcaggtgattcgcccactgtggcctccaaaagtgctgggattatgggcatgagccactgtgcctggccgacatacctctttttcatcacctagatgatgtgaccattttattttccatgtccctggcatattttgggtatagtgacatatcattgagttcaacacccattggatggggttatctgggagatttaattcccctcttctgtctgcaccctgaccactagggattgtgacgaatcactggtctcagcaatcaggggatttgttttttttgcctggtcctcgcccacagagaacattgtaacatatctctggtctcagcactcaggtgatgtgactcttctgactgtattctgctttcaggaggggattgtagcatattcctaatggagcaccaaggtgatgtgacactgctgcctggtccctgccctcagagaagattgtgacatatcactgccccgaaacccaggtgatgtgagtctactggtcggtccctattcactggtgggattatgatgcatatcttggcccagcttacaggtgcaatgattgctttcataccttgaaacaaccaatagcagatacactgtctctcatagccagagttaggaaaatgggtaatatcttgggtctcctcttcgtgtgaaagtcatggagaatctctcacatactgtgtaaagttgtcaaaaggtacagcggatgtcctaacagaactcagcacacaggtgaggttgtgacactcatatgtatgacctgccaacagtaaatatttcatccttccatataaacatagctcacaattcagattctgaatatcacacccagaggcagtcaaatgttggaaaatggaatctcatatgtgaattcgctccatgcgggggttggcatctttcagaccaagattcggcacacctgtgagtctgtgactccactaaggggacacagtttgcaggagggattgaggttcttatacatggatccagaccatcattgagattgtgactcatttacttagactcaacatacaggaagtgttagatctcatacctagaacaagaaaatgtgtggaattgttaatcttatgcttcgaccttcatgcaggtgtgattgttacatacacctctgcccagcacctgagtgatttgactcttctgcttgggcccagcgtacagatgggattgtgccgcattgctggacccagcacttaggtgatgtgagtctattctcttgccttattgcttttcacggagggcattgagacatcactgggcctagtgcccaggtgacgtgactttcctctacttcctgggcttttcccaagaagggattgtaatatattgctgggaccagaacctaggtgatgtgactctcctctcctgcctggttcctcttgcacatattgtgacatgtggctggtcctgataccttggtgatgtgactctcctgcatgggacttgcccacagaggtattacaacatatattttcattcatcatctaggtgatataattctcctcttctgcctggccctgccaaaaagtgggagattatggcaaatcactgaacccagcacctaggtgatgtgactctcttgtttggcctgggcctctcatgttttgggtattgtaaaatatcactaggcccaccacctatgggattgcatgctcctaccttggctttgcccacagggaccttgtgacatatatctgcacccatgacctagaagatgtgacatttattttttgcctgcaccctgccctgcacaggaatgattgtgacatatccttggaaccagacaccaggtgatgtggctcttctgcctctgtcttgcccacagggagcattgtaacatagcgctgagctcagcacccaggtgatgtgactctgttgcctgtgctgtgctttcaggacagaattgtaacatatccctggctgagcactcaggtgatgtgacactcctgcttggcttcttccctcagcagattatgagatatccatggctgaaatccaggtgatgtgactcccctgctagctcccttcttataagtagaattgcgacataggctgtggtcagcttacaagtgtgatgatgactctcatgtcagcttacaaatgtcatgatgactctcatgcctcaagtcagctattagaagaaatactggccaggcacggtgggtggatcacctgaggtcaggagttcgagaccagcctgaccaacatggagaaaccccttctctactaaaaatacaaaaaaaattagccgggcgtggtggcgcatgcctgtaatcccagctacttgggaggctgaggcaggagaatcgttccattgcactccagcctgggcaacaagagcgaaactctatctaaaaaaaaaaaagaagaagaaatacctttcatagctcagaaaaatgagcgacatcctgggtctctctttgtatgaaggttataaaagattgccacacccccacacgtagtataatgccctcaagtgttagagtgtgtcatcacagggcacagcaaacctcaccaaccattagtattatcaccctcacacatggaaagagcccgctgctgaggtcttgaatctcacatgcaaacagtccacagttggaattgtgactgtcatatgtgagcatccagccacagttgggatggtgacacatttctaaactcaaaatcataggcagatgaggtctctactatttggatccagccaattggagaaatgttgactctcacacctgggcttagggccacaggtatggtcatgggggcatataaacatgaaggggtcagagtgaattgtgacccacattcatactacataaagccccttgggtagtatagagagtgtattaacaaggcccagcacacaggggagatgttgacagttgtatgtacacccacccaacagtatacatcatcatttccccacatgaacacagcccacttctggggttctgaatctcacacctataggcagtcaaaggctggaaacttgactctcatgtggattcagtccacaggtgggttggtgacattcagagcaagattcagcacacctatgtggctgtgactttactatttatacgtggcgtgcagaaggagttgaggctgttgtgcacaagttcaatccaccgttgagattgtaactcctgttcttagacacaacatataggaggttaacaccgggacatgtgtgggattgttaatgtcatccctggaccttcctgcagttttaactgtgacatttttcttttcttttttttttttttgagatggagtttcactcttatcacccaggctggagtgcaatggcacaatcttggctcactgcaacctccgccttccgggttcaagtgattctcctgcctcagcctccgagtagctgggattacaggcatgtgccaccacgcagggctaattttgtatttttagtagagacagggcttctccatgttggtcaggctggtctcaaactcctgacctcaggtgatccacccgcctcggcctcccaaagtgctgggattacaggcgtgagccaccgtgcccggcccaattgtgacatttttctatgccaggcacctgagtgatctgactgtcttgtctgggaccagcccacaggtgggatagttctgctgaacccagaactgaggggatgtgactcttcttctgtcttggtgctgctcgtagaggacattgtgacatctcactgaaccttgcacttagttgatgtgagtctcctctcctgccttggcactgcctactggggcattgtgacatatctctgggcctacatccaggttatatgactctcatgcctgtgccctcaccacattgtgacatattgctgggtccaacaccctggtaatgtaactctactgccaacaaggaacattgtggtatttttttcacccattacccaggtgatgtgactctcttcttttgcgttgttctgctcacagggggaattgtgacatatcacttggcccagtaccaagcaagtgtgactgttctattcatcataagtcctgctttcaagggagattgggacatattgtggggctcaacaccaatgtgacattactgttttgccttggcccagaccttaaaggcactgtgacgtattgctcggctcagcaacaaggtgacgagagatcctgtgtggacattgacaacagagagcattgtgacatatctttgggagcatcagctatttgatgtgactctccttttataccaaggctttgctcataggggagaccgtgatgtatcttctggcccagaaatcaggcgatgtgtttctcctgcctgagctttgctcacagggagcattgtgacatatcactgagcccagcacccaggtgatgggactctactgcctgtcccctgctttcaggaggaaattgtaacatatctctgaccaagcacccaggtgataagtcttctgcctggtgcctgttctcagggaagattgtgacatatccctggcccagcaaccagatgatgcagatgacgtatctctcctgctcactctctatccacaggtaagattatgacatataatcacgcccagctaatttttgccttttaatagagaaggggtttcgccatgttggccaggctagtctcgaattcctgacctcaggtgatctgcccaccttggcctcccaaagtgctcagattacaggcgtgagccatggtcgctggcctagggagtgtgactttctttttgctgcctgttctctactcaacggggtaattgtgacatattgctggtcccagctcctagctgatgtgactgttttctttttcctaggttctgcccacaaaggagattgtggcatactgctgggcctaacactaaggtgatgttacttctctgctttggctatgtccttagaaggcattgagacacactgctgggcccagcaccaagatgatgtgagtcctctgcctgaaccctgaccacagggagcattgtgacatatttcttgacccactgcaatctctcctatggacaaagcccaggtaaatgccctattttacctatgtgatgtgacactcctcttctgcctgggccaagcacaccagtgatgtaattattctgcctgttccctgcacacaggagtcactgtgctatatatttgggcccatcacctagatgatatgactctcctcttccagggtttgtcctcagtgagaattgtgatatatcgcttgacgtagcttctatgtgatgtggctcttctctcatgcctggtcccttccctctggggtgattggaacataaagctgatccccacagctacgtaatgtgactttcctgtttataagccctacccacagggggcattgtgacatatctaggcctctcacctaggtaatatgacatttatgcctagggggtattgtgaaatattactggaccaagaacttaggggcccacaggaggcctttgttacatatctgtgcatccattactttggaggtgtgactctcttccatctgcaccatgcccatacagaaaattgtgacacatctctgggttcagcaaccaggtggtatatcttttgtgcccaggccttgcctgcagagagacatagctgggcccactacccaagtgatgtgactttgatgactgtgccttgctttcaggagggaattttagggcaacagaaccctggccaggcaaccaggcgatatgcctggtttcttccctggaaaaattgtgatatattcctgacccagcacccaggcgatgttattctctcatttgctttctactcacaggttggattgtgacatatactttagcccagctcacagttgtgataatgacactcatactgacaaatcagtcagtaggagagatactggcacttgtagctaaacttagagaaacaggtaaattattggggtcttctctaggtaagaacattataaagcataaccattctttcacagtttgtataaagtctttggatggtacagagtgtcatcacagggtcaagcacacaggtgagactgtgtttctcatatgaacaacctaccaaatgttggcaaacctaccaacaccctcacacatggacagagctcactggaaagatcctgaatttcacacgtggatgcagtccacagtaaaaattgtgactgtcatatgtgatcatgtgaccacagtcaagatgttgactcatttcaaaacaaagctcataggcagatgaggactcttctctctggtcctagccaattagagagatgttgactctaacacatgggcttaggtccatagctacgattatcagttcatactagaacagaattctcagagcaaattgtgactatcatgcatattgtataaagccctcagatggtaacagagagttttgtaacagggcccagcacacaggtgacattgtgatactcatacacacactcagccaacagtaaagattgtcatcttttcatatgaacacagttcattgttgaagttctgaatctcacacctagagatagccaaaagttggaaaattgactttcacacatggattcagtccacatgtgggctggtgactctcagaccaagattcagcgtatctgtgaggctgtgagtccactaaggggacacagtccactgcaaagattgaggctgtcatgcaggtatccagtccaccattgagattgtgacttgtgtattcagactcaacatacaaaaggtgttgactctaatacctagaaatgggacatgtgtggaattgttaatttttttttttttttttttgagacggagtttcaatcttgttgcccaggctggagtgtaatggtgcgatctcggttcactgcaacctctgcctcctgggttcaagcgattctcctacctcagcctcctgagtagctgggattacaggtgcccaccacaatgcctggctaattttttgtatttttagtagagatggggtttcaccatgttggccaggctggtcttgaactcctgacctcatgtgatccacctgcctgtctcccaaagtgctgggattacaggtgtgagccaccacacccagcaggattgttaattttatccctaccttttccttcaactgtgactgtaacatacacctctgcccagcacctgagtgatttgacttttctgcttggtgcctagtccacagatcagattgtgatacattgctggacctaacactaggtggtgcgactctgtacttttgccttggcactgcccacatgggacattgtgacatatcactgggcccctcaccctggttatgtgactctcctacctgtgccctgccttcatgggtcattgtgacatattgccatttgcaacatccaggttatgtaactctccttgctgggtcctgcctacaggaagctttatgatctatctgtgtattcatcatccaggtaacgtgactctttctcccaggtccctgttcaaagaaaggattgttacttatcaatgggcccagtgccttagctgatatgactcttctacctatattctgcttacagtgtacattgtgacatactgctgggctgaacaccaaggtgatgttacatttttgccttggcgtttcttttcatcaagcattgtgacatattgttgggctcagaaccaaggtgatgtgatccttctgcctgaaccttgctcaagagtcaacaccttttgcccaacaagaatagtgacatatttgtgaatccatcgtctatgtgatgtgactctcttacttggatttttcctataggagagattgtgacatatcacagggcccagcatctagataatgtgacgcttctttccttccatggccatgctcccataaaagagagtgacttatccctgggatcagcccacaggctatgtaattgttctgcctagtccctgtctacaggggttattgtgacatatctcttggtcccgttcttcttctccctgggacttgtccacagtgggaattgtgacatatcacttggcccagcacctatgtgatgtgactcttttctcatgctttggccctgcccactggttggttgtgatatgtagttgggcccagctcttaagtcaggtgatctttctcttcctcctgagccctactctcccaagaccagctaggtcatggagaccctaacccagcggagctagaggaattaaagacacacacacatagaaatatagcatgtggagtgggaagtcaggggtctcacagccttcagaactgagagcctcaaacagagatttacccacatatttattgacagcaagccagtgataagcattgtttctatagattacagattaaaagtatttcttgtgggaaataaagggatgggctctggctagttatctgcagcaggaacatgtccttaaggcacagatctcacaagctattgtttgtggtttaagaacgcgttaagcagttttctgccctgggtgggccagatgttccttgccctcattccagtaaaccaacaacctttcagcatgggtgtcatagccatcattaacaagtcacagtgccgcagagattttgtttatggccagttttggggcctgtttatggccagatttgggggcctgttcccaacactactcacaggggacattgtgacatatctctggggctctcatctagatgatgtgacttttctgccagggctcttttctcagaggatactgtgacatttcttgacctagaacctaggtgatgtgactctcttctgcttgggctctgcctgagatgtgacttttttttttcccctgggctttgcatacattgtgtattctgatatatgactgggtctaagacccaggtaatatgactctaactcatgggttctgttcagaagggtattatgacatatcatttgttcctcacttaggtgttatgactctcgtcttttcactggaacctgccaaaaagggtgattgtgacatatcactggacccagcaccttggtgatgtgactctcctctcctccttaggccctgcttacattgtgtctgttgaaatacggctggtccaacacctaggtaatgtgactctcctgcataggccttgctaataggggatgtatgacatatgttttgtttatcacttaagtgatgttactctccttttcttcctgaatcctgtaaaaggtgggggattgtgaccctatcactggacccagcacataagtaatatgagtttcctgcataggctctgttcagaagggtattatgacatatctttttgttcatcactttgtgacttgtcttttgactggaacctgccaaaaagggtgattgtgacatattgctggacccagcacctaggtgatgtggctctcctttttttctgggcctcacatattttgggtattgtgatgtatagctgggctcaacacctagcagttggggagctcctttcttgaccattcccacaaatgacatatctctgctatgaccgcctatgacacatgacctaaatatgtgacccttcttttctgcctgtaccctgctaacagagaagattgtgacaaattgctaagtgcattgtatcttgtgctaaccttctatctcagcctgtgaccaagaatgcctaactgccggggaatgcagccctgtaggtctcaacctcaatttgcccagccactattcaaaatagagtcactctggtttaaatgcctctgacattaagatacactgtaaaattatgaaaaaagttgatttgaattttagcaaatgagaaatgaaataattagaatgggctattctgaaagatatagcattagttatatttgtgtttgagttttctattaacctatatttgttacttatgaatagataccttgttttattctgtctaaacagatacactaggtggggtgcggtggccatgcctgtaatcccagcactttgggaggccgaggggagtggatcacctgaggtcaggaatttgggacaagcctgaccaacatggcaaaaccctgtctctactaaaaatacaaaaatcagctgaccatggtggcgggtgcctgtaatcccagctacttcagaggctgaggcaggagaattgcttgaacccgagaggtggaggttgcagtgagccaagatcatgccactgcattccaccctgggtgacagagcgagactctgtctcaaaaaataagaaaaaataagcggccgggcatgctggctcacgcctgtaatcccaacactttgggaggccgaggagggtggatcgcaaggtcaggagttcaagaccagcctggccaagatggtgaaaccctgtctctactaaaaatacaaaaattagccacgtgtgttggcaggtgcctgtaatcccagctactcgggaggctgaggcagagaattgcttgaacccaggaggcagagtttgcagtgagccgagatctcaccattgcactccagcctgggtgacagagggagattctgtctcaaaaaaaaaaaaaggacataaatttaatgttaagtgtggactcataaagaatctagacagccaccaagccatttgtttattcttgatttcttaaagcttccattattaaaagctctgcattccattactcatcacagaaaataatctaaattaaatatgaattaagtttgtgtgtgtgtgtgtgtgtgtgtgtgtgtgtgtgtgtgtgtgtggtgattattctaaattactaaacagattaaggccaatttttttatgtcaaacatataattctgagaaacaatcaatactttatgtacatttctgttacctaataggctatttaagcatttatacagaaattttatacagttgtcatttttaatgcatgttttctgatagtataaaagctttctcatgcaagaaggctgatgttataatagtagctaaaagaatattagaaaatatgtttttttttcatgggacatttctgaaaggtctctaatgatcaagatacttatttcactagacaagttgtaaaactgttaaataaggtattgttcctggaccaaactgagagttgggctgctatttctcatggcccaataacgagatgcagatgaactggggaggaagagagttttatttctgcaaccagttacagggagaaggcctggaaattatcaccagaccaactcaaaattacaacgttttccagagcctatataccttctaagctatatgtctacatgtaagtgtgcattcatctaaagagataagtgattaacttcttttatttaatctgtaactaaggtctgagtcttgaagaccttcccctgcagcctcagtaaatttacttaatctaaatgggtccaggtgctggggtaattacccttatcttgtctcctgctaaatcacagtggtttggtgaattccttcagacctccaataaacctgtttgtagaggcctggggaatttcttcagacccccaataaaacttgtttaatcctataaggcccaagaaaggcctaggcgaaactcttgatgggcttttgttacatcccagcctttgtataaggtcactggctttttttttttttttaattgagacggggtctcactctgtcaccaggctggagtgcagctgtacaatctcagctcactgcaaactccgcctccagggttcaagccatccttctgcctcagcctcccaaatagttgggactacaggcacatgccaccacgcccagctaatttttttgtatttttagtagagacggggtttcaccatgttggccaggatggtatcgatctcttgaccttgtgatccgcctgcctcggcctcccaaggtgctgggattataggtgtgagccactgcgcccggctggtcactggcttttaatatttaacttaaccactcagtcagtactgaaacagttgttagtgaggtctggcctgccacagtattacaggtacaatagtattgagcaaagctaactaaattgactggattgcttttgtaattgcagattgatgacaatcagattcacttagagtggaaaaagtatgttggcccttataaaatagtcattagaaggcctatgtgcgtaatagaacctcatgtgtcttctgctactaaagtctaacattactaaattcaacaaggctttaatgcattatggcaaagcacattttcaccaggtgaggaaagcctttactagtctactgactgaggagagtaaaaccctttataatcaagaacccagagattgaatctgcctgccacctacactgacgcaagacttcaagaccttgaacattggattgataatctcacaacttagaagggcccctccaaactcttgaaattgtaaacccataggagattttaaggtaaagctaaccaggaaagtttgtcctcaaaagcagatggccgtctccatgtagatagcttttttcacaagatcaaaaatcaagacatctcgttatcatgacactcttagttcacagtttgtttatggttctacaaaccacagaaattttaaaaagtggtctcttgtgtgcactcatgggggtatacttatatgtagagaattttgcagccaacattatgtatgaggaaacttattccttgaaaggtaaaagaagaagggccaatgtaggtgagaagttttaatgaaacatttgttttctcacaatatcaaaaacagaatattggtccactgctcttaacctatttcataagttaaaaagaacttattcagaataggttaaagagcattgccaggaggccattactcttctgaatgggtatcactgtttagagtaaatgaggcaatggttacaaatttatccctctcaatagggctctatagcagattataccataaaaactatgcttacacaatagactttaagttttctcacaaagttatgctaaatataatttcttttgattacttactggataaatagatatctgtgcagttgctaatagttgcccatggagaactacagccggtattacagagatgcagttgtagatgattcatgaacaggctgattagatgaaatgagtagatcatttatctagctaactatttgatctatttaactttaattggttgttcatggggaccctggctaaaaagcatgcttcaaactcttggtattatcctcctgatagtcaaaatggtaatcttcctactgcactgtattctctcaaaagatgtaaacgtttgaatgtagtcatctgtagaatgtcaaatggtctctctttaactggaatgacagaaactcaaagacatatgtgactatgaagacagcacaacctatgaatgacatgctaaggacaaaaaacaaaaataatggaaactgagagtggcactaaagccccgagttttggttacactgtgacctatgtaagaacttaaccaaacggggaattttttaaagaaaactattggaggccataattctggactgagcttatgcactaggtccaaacaaaccaaaccaaaatgagtcactcatgctggatgtgacataattaaactaaaaatttaaggcaacaggtagattctaaaactggccaggttttgtttttcttctctaaatagcagatttcaacacaaggaggtcccctgtactctaacactttaaaaaacaaataaaaataatttcaaaataataagctgaagtttttatttccactttacaaacccacagttctgctgtttcacagtgagattcgagtctaaataagtacatttttgatggtgacaaagtgatattaatgtctaaagttttggtctcaaacttgagaagatgacaaaagggagaaattgttaaattagttgtagcctaaagcttccctcttatgtttaattttggctaataggatttgttttttgttttttgtttttttacatagtaaacttaatgttcaaatgggacatatcttaagctgtaataaatctggctgtttctgtacctcacttccattttctgtatgtcattttgcttttctggttcataaaaattttaccaacatgtggctgtgttggagtctctctgagcctactctggatccataggttacccgatttgcaaatcatgatttgctcatttaaactgttaaatttaatttttctaaagttttcttcttttacaaattttcaaattttttatgatgaaaataaataatgttattgagctttgattttctaaaatcatcccacagctattttcccaaataataataatataataataaataataatacaataatttcccaaataataataaaaatagtgaaaaggcagctgatgatacatgtctgaaggacctcagttgagcccagcctaaatggctgaccatctcaattacgagcaaataagttttggatggtttgttatgctgcaatagctaactaatacatgcaccctgtgcagatggaatgccaggatttaatgacaggttgattactagttaccttctgacagtggacaccctaaagatactgacttttcttttctttttttcccgatttgaagttggatgtctcctaagacaatgttgagtaatgcagaaatacaggtagacatgtatgtgtgtgattggtgcttatactcacacagtaccccacaccacaggaaaaaaacagataaccacagcctgaccattagagccaaggccaaacagcaaaataagtttgcctttaatttattttcttcatatctttttttttttttttttttttttttttccgagacggagtctcgctctgtcccccaggctggagtgcagtggcgcgatctcggctcgctgcaagctctgcctcccgggttcaagccattctcctgcctcagcctccagagtagctgggactacaggcgctcgccaccacgcccggctaattttttctattttttaagtagagacagggtttcaccgtgttagccaggatggtctcgatcttccgacctcgtgatccgcccacctcggcctcccaaagtgctgggattacaggcgtgagccaccgcgcccggccttcttcatatcttaaagttagaggttaagactgtggacagacccaaagacatagagttttcttctcctgtctcctgtggccccagaattttttgttcactgtctgatctctggatgaaaggtggacaacaggtggcaaagagtggtctacctgtggttattttatttgtgctgccctctgcccttgctatggccactatctatcgcaccctcagaaccgaagatagatgttagtagagagaggctgtctcctcacctctggcagaaaagggatgttcagggcctccacccacctgacatcagagctgcacttcaacgtggtggctgttggccatgtgtggctcctgggtgcctggaatgtgcctggtctgaactgcaatttgctagaaaagtaaaatacagagttggtttcgaagatttagttccaaaaatatatatagtgccttaataattacatattgctgtgaccccagaaaatctgagacatcagttaatttagaaagtttattttgccaaggttgagaacacgcctatgacatagtttcaggaagtcttgaggacacctgcccaaggtggtcagggaacatattggttttatacattttagggagacatgagacatcaatcaatatatgtaagaagtacattggttcagtctgaaaaggtgggacaacttgaagcaaaggcaggaagacacgaagctggagggagcttccaggtcacagataggtggactcaaattcttttgagtttctgattggcctttagttcccagcttgagttttccttagtaattttgggggcccaagatattttcctttcacattgctcacatattaaaattataatactttaaacatattgggttagttacattattacaatcaattccacgtgtttcatgtttctttttaaagtttggctactggaaaattaaaaattcacatgtggctcacattttatttcagaggactgcctcctttttaaaatctcaggctgcctgctcaaaggaccagaagctaggaaggtgataaaagctaaaatttaaaagtaattgttattatattcttttcatttgtgactagccatatagtatatttataaatgcatatgaccttacacacaaggttcaatgcaaacaccctctagggtgggcctggctcagctcggaggaaagcctgcctgaaaaggctgcagctaggctgtcacgcttcattctgcccagcaactgatcaccctctgtcactcagggcctgagagggcgggtcttaaacattatccaatcaggcacgcagctggagcgacaggacggtttccggaatatggcggggcgtttggctcttgctgcagccagagctccaggtctcgtcttcatttctgtgtcctttgttcttagaggcccagcctgtgtggccctgtgacccgcagatattgggagatacacagctaagactccaggaccccctggaagcctagaaatggtgagagtgccgagtctgacatccccagagagggggaggggctggtcggaaccgtgagaagtggccgtggcggacttaggtctcccggcagtcagctccacaatctgcgcccggaattctccttgcccagctcggcttcagtccccttcagccataagatggcgactgtgctgacagccgggccccgggcgtcctgtcttccctccgcagtgactgtgcctgacgtgtagccctgtctggggagctctgcacgcgcaattccgcagtctctcccagattgtgcaagaaccatgggaggggcgtcaggtgagaatagtgactcgggatgcgggttcatgagcgggaagagctttggtccgtggggttcccagttcccattctctcctattaaaaatctatgggagtggccgggcgcggtggcttatgcctgtaatcccagcagtttgctgggaggcgggcagatcactgaggtccggcattcgagaacagcctggccaacatggtgaaaccccctctctgctaaaaatacaaaaattagccggatgtggtggcaggcatctgtaatcccagctatgtgggaggctgaggcacgagaatcgcttaaacccaggagaccaagattgtgccattgcactccaggctggttgacacaatgagactatctcaaacaaaaaaaaaaaaaaaaaaggggagtcactgcaaaatattaaagaatttaattaaagagtggttctaaaattgtaaagcacccagctgtgggatgtagtttgtggtcctttggaggagcttgaaggaaagactttgcgcatggtacaaaaacgcaaattcagttattggttaggtagggttacgtagtttcttaatttccatcttcagcttacaaaatttcctggttatgtaatcagagcttaattccagttaatagttaaccctgtatttgttttccccagtgtagtaatttacaaaaaaaaaagcatttgagttagttttttgtttttttttttttttttttgagatggagtttccctcttcttgcccaatctggactgcagtggcgcgatctcggctcactgcaccttccgcctccgtgttcaagtaattctcctgcctcagcctcctgagtagctgggattataggcaggcaccaccacgcccggctaattttgtatttttagtagagacggggtttctccgtgttggtcaggcttgtcttgaactcccgacctcgggtgatccgcccatctcggcctcccaaagtgctgggattacaggcgtgagccacggctcccggcttgagttagatcttttaaaagtaggaattcagggactacagccacctcagtcgaattgcctaccacttaactattttcactccctacacaaaactgatcttcccctgcatttttcacaggtgtcctaagcagggtctcaaatctactcccacgccccccattcctccagcctaactctggcttgcagtaaaatacaaaatttccatttcctcctgacaatcccaaatgccaactcccactactccctaattcacactattaactatttgtcctttagtgtacatttttgatactgtattttaattaaacattttttgacaaagcattggatggcacatttaaaaagatttgttttctgtttataaatattttccataagaagaaagcaaggaataatcttctgacactgtattgtaaaaaaatctttgtctcttttccttttatcttccctaggcatagagattttatgagaatgttttggcatcaaggtttttcttggaatttttgtggggtgatgtgtcctcagccaccctttagtttttttcctggtcctgggttccagtactgtctgtgaataaaccaagatatcagtcatggctatgtctgcaagactgtctaatgaatattaattcctgggtcattttctcccataggacaacctgtggtatggagtgtagcctctgaagggagcaggtgtattccctggggctgagaggaatctcctggtgtacttttcgtttgaaaagctaaccccttcagatgttaagactgtgttcacccagcccgactttcctttctttgggccacattgctggtcacccaatcaaatgctggtattgagttgaaaacaaataatttctgaccccttgattctctacaatttgtgaaaaaagactagtatctctgccaggcacggtggctcacgcctgtaatcccagcactttgggaggccaaggtgggcagatcacctgaggtcaggagttcgagaccagcctagctaacatgatgaaattccgtctctactaaaaacagaaaattaaccaggcgtggtggtgcatgcctgtaatcccagctactcaggaggctgaggcagaagaactcgggaggcggaggttgcggtgagccgagatcgtgccattgcactccagcctgtgcaacacgagtgaaactccatctgaaaaaaaaaaaaaaggtgatatctcaaaagacaaaagaaaccctgaccccggtgagatgaggcgagaaattgcaaagtaaaatgcacttgggacacttactggaacatagagcagtctcctgagagggtggttattgagtacttaagtgacttaagtgagcgggatgggtaggagaatctctcaagtgattgaacttgacacatgagtcggacacatctgttttcttatcagcactgccactccctgggtttgtcactttgaaaagatttgttcacttatattgacttcagttttttaactctaaattgcaattttttagtagagcttgaaaggtaagaaaatatttacaaagcgcataaaagaggtgggcttcagaaaaatctatcttttttttttgttaaaaattctcatgtacctttttctttcttagagtgagtttagaaattttctcaggcttttttttttttatggctgggtgatttcaaacagaattccaaggcttagattttggaatgctaccaaggaaaagaatagggaaaaatctcttccattttggctgtagaaaatgaatgcatttccagaagaaaatgttgtagataataggtgagttacatgaattcatgaaaacatcagttgtttttgcaggataaatttctgacagtgaatatctctgttctatatcctgttatctttatttcagagtttaatgctgtattttttagatgaaacttggtgcctcctagaagtgttcccatatgactaattgtttactacattttttttttttttgaaatggagtcttgctcaaggctggggtgcagtggtgcgatcttggctcactgcaacttctgcctcctgggttcaagcaattctcctgcctcagcctcccgagtagctggaactacaggcgcacactgtcgcgccagcctatttttgtattttagtagagacagggtttcgccgtgttgcccaggcttgtctcgaactcctgagctctggcaatctgcccctcctaaagtgctaggattacaggcatgagccaccttgcccggcctactacatgattttttaatggaaataataaaataatacatttataaaggaatagatacttttgcttttcttattgaggtatgaaatgtaagcattgtaaaattgccttgttttatatgaacattgagtaattttgctggatttttcgaacacttagtttcaaagaccaagtgaataactctgacacggaaattaaaacttgagcccagtgactccaagctaaggctaatattgagcctgcaaaagaaggttatttaagatccagttagttctttctggggagcctcccctgcaggtgtccctgcctgctcaccccagccatggaaggaggctttatcctgagagaagctacagagccctggaaagctgggaacccacaggcagatacagttacagttaaggtggaagggaactgggaggatcttactgaagataaagttgtccttgttttgagacagtttttagactttgtaaagtagaacaaagttagatttgtataaaaaaaagaaaattgaattaccaaggagtattgcaacaggaggaaataccaaccataagagctttaaggattgcaaagtttaggcagacaaagcctttcttttctttttttaataatttttttttttttgagatggaatcttgctcttgttgcccaggcaggagtgcagtggcacgatctctgcttactgcaacctccacctcccgggttcaagcaattctcattactcagcctcccaagtagctgggattacaggtgcccgcgaccatgcccggctgacatttgtatttttagtagaggcggggtttcaccatgttggccaggctggtctcgaagtccttacctcaggtgatgacaagggctttctttcataggggtgagcaaacaagattagaaaaaagatgggaggggaacggcaaatggacggtaaaaacatcagattctagatcagagaatgttttatcctgaggtcagcatgttcttagaagggaagtagaatggggttgtatgttggctcagacggagggcagcccaaagtccaggaacctctgggaaggagataaatttcagcgaggtctgatatggaagtacaggaaagtggtcccaatccaggctccaagatagggttctttgatcacacgcaagaaagaatttagagtgagttcatagagtaaagtggaagcatgtttattaagaaaatagaggaataaaacaatggctacttcacagacatagcatcccagagggctgctggttgaccactttatggtaatttcttttttttaattttttaatttttttttattgatcattcttgggtgtttctcacagagggggatttggcagggtcataggacaatagtggagggaaggtcagcagataaacaagtgaacaaaggtctctggttttcctaggcagaggaccctgtggccttccgcagtgtttgtgtccctgggtacttgagattagggagtggtgatgactcttaacgagcatgctgccttcaagcatctgtttaacaaagcacatcttgcaccgcccttaatccattttaccctgagtggacacagcatatgtttcagagagcacagggttgggggtaaggtcatagatcaacaggatcccaaggcagaagaatttttcttagtacagaacaaaatgaaaagtctcccatgtctacttctttctacacagacacagcaaccatccgatttctcaatcttttccccacctttcccccttttctattccacaaaaccgccattgtcatcatgacccgttctcaatgagctgttgggtacacctcccagacggggtggtggccgggcagaggggctcctcacttcccagaaggggcggccaggcagaggagtcccccacctcccggatggggcggctggccgggcgggggctgaccccccacctccctcccggacggggcggctggcccggtggggggctgacccccacctccctcccagatggggtggctgccgggcggagacgctcctcactgcccagatgggacggctgccaggcggagggtctcctcacttctcagactgggcggccgggcagagacgctcctcacctcccagacagggtcacggccgggcagaggcgctcctcacatcccagacggggcagtggggcagaggcgctccccacatctcagacgatgggtggccaggcagagatgctcctcacttcctagatgggatggcagccgggaagaggcgctcctcacttcctagatgggatggcggctggacagagacgctcctcactttccagactgggcagccaggcagaggggctcctcacatcccagatgatgggcggccaggcagagacgctcctcacttcccagacggggtggcggccgggcagaggctgcaatctcggcactttgggaggccaaggcaggcggctggaaggtggaggttgtagcgagccgagatcacgccactgcactccagcctgggcaccattgaacactgagtgaatgagactccttctgcaatcccggcaccttgggaggctgaggctggcggatcactcacggttaggagctggagaccagcccggccaacacagcgaaaccccgtctccaccaaaaaaatacgaaaaccagtcaggcgtggcggtgcgcgcctggaatcgcaggcactcggcaggctgaggcaggagaatcaggcagggaggttgcagtgagctgagatggcagcagtacagtccagcttcggctcagcatcagagggagaccatggaaagagggagagggagaccgtggggagagggagagggagagcggtaatttcttgattatatgctaaacaaggggtgaattattcatgcctcccctttttagaccatacagagtaacttcctgatattgcattggcatttgtaaactgttatggcactgatgggagtgtggcagtgaggacaatcagaggttactctcagggccatcttggttttggtgggttttagctggctcctttactgccgtctgttttatcagcaaggtctttatgacctgtatcttgtgccaacctcttattatgcgacttagaatgccttaactgtgggccatgcgcggtaatttcagcactttggaaggctgaggcgggtggatcacctgaggtcaggagttcgagaccagcctgaccaacatgatgaaaccccatctctactaaaaaaaaatataaaaattagctgggcatggtggcgggcgcctgtaatcccagctacttgggagacagaggcaggagaatcacttgaaccggggaggtggtggttacagtgacccgagatcacgccactgcattctgcctgggcgacagagcaagactccatctcaaaaaaaaaaaaaaaaaaaaaaggaggaaagaatgccttaactgtttgggaatgcagcccaataggctctggtttaaatgcctctgacagaagtattttatttttaccactgaagtcaaattcagctaccatttttatgagagcaagaagaaaatgtgcagagtctatgtctggcttatgtgacaggtaagaatagagagcaccatctaagtcttttttttttttttgagatggagtctcactctgtcttgcacgctggagtgcagtggcgtgatctcggcttactgcaagctccgcctcctgggttcacaccattctcctgcctcagcctcccagtagctgggactacaggcgcctgccaccatgcccggctaattttttctatttttcagtagagacagggtttcactatgtcagccaggatggtctcgatctcctgacctcatgattcacccgcctcagcctccaaaagtgctgggtttacaggcatgagccactgcacccggcccttagtcttaatggtaatggggtttctttccataaactgtttctggcacacaaaggatagagaattttattaatcacagctgttttctcggattatccacgtgctttttattttcccacctcttttctttgtcctatacatttcttccatttgacttctcctggattttatcttttataataaaccagtaaacataactacagtgtttgctgagttctctgagtagctctgtccaattattaaacttcatagaggttatgaaagtcctgaatttttaaacagctcagaagcatagatgggcccatggggtttgtgactggcatctccagtaaggacaatgttgtgggaccaagccctgaatctgggtctctgctgactctgggtggtgtccaaattcaaatgttagacattgagttgctgttggagaattgcttggtgttaagcaaactctacagatttggtgccagaagaaagatatcacagaggcctgtcctggaataaaactcttggtatctggaaatgggaggctctgctctcctgtacacaggctttcacactgcccattgtcctgtgattccaggtgtcctcttagggtaagagaggatgaaaacttagagggaacgatctctgatgacagactcccttttcctgcagctgccaccacgtgattcccacccactcacatacacacccactagacattgacatgtccacatccctcccagaatgaagcaccaccctcaggaacttcaccacagcatttttgatcccagtgttccttcccagaaatgcacaaaagtgtctacaagtctcctggaatattcctactcccagacacaatctgcaacagcaacctgtttttctccaccaacttagggttctgggccacctgtttgtaatctcatctgcctccatggacctagaaataaatcagtacagccccacctggaccattatctgtagcacaaaccagtcttttcacctacatagtactctcccccaactaatgaagttttttccttttaacttttatttttggtctaggggtacacatgcaggtttatcatatagataaaattgtgtcatggaagtttagtgtagattattttgtcactgaggtactaagcatagcatcaaacaggtatttcttattctctttgtcctcctaccctccaccctcaactaggcctcagtgcttgttgttcctctctttgtgtccatatgtgcttgttatttagctcttataaatgagaacatgcatttggtttcttttttctgcattagttttctgaggataatgggcttcacctccattcatgttgctgcaaaggacatgatcttgttcttttttttttaaataaccacacagcattccgtgatgtttatataccatgtatattttatacacacacacacacatatatatatttttttattttatttttgagatagagtctaggtctgttacccaggctggagtgcagttttacaatctgggctcactgcaacctccacctcccagattcaagtgatttctcctgcctcagcctcccaagtagctgggatcacaggcacgcaccaccacacccagctaatttttgtatttttagtagagacggggttttgccatgttggccaggcttgtctcgaactcctgacctcaagtgatctgcccacctcagcctcccaaagtgctgggattacaggcatgagccactgtgcctggccaccatatatatttttatttttttaaattattttattttgttttatttcattttattttttgagatggtgtctcactctgtcacccaggctggagtgcagtggcgtgatccccgctcactgcagcctccacctcccagattcaagtgattctcctgcctcagcctcccaagtagctgggattacaggcatgcaccaccacgcttgtctaatttttgtatttttagtagagacagggtttctccatgttggccagactggtctcgaactcctgacctgaagtgatccccgtaccttggcctcccaaagtgctgggattacaactgtgagccactgtgcctggcctttttttttttttttttttacttttttatagtagccattctgactggtgtgagatggtatctcattgtgatttttctttgcatttctctactgattagtgataagaaagaaatactcatcaaatgcttgttagccacatgtatatcttctttagaatggcatctattcatgttttttgcctactttttaataaggttgttttttcttgtaaatttgtttaagttccttttgaattctggatattagacctttgtcagaagcatagtttgcaaatattttcttctattctgtagattgtctgtttactctgatttttttttgtgtgtggtgttttttgttttttgtttttttgctgtgaaaaagctctttaattaggttgcattcatcaaattttgcttttgttgcaattgcttttggtatcttcatcataaaactttgccagttcctatgtctagaatggtatttcctaggtcatcttccagtattttttaagtctttacttaatcttgagtatatttttgtatatagtataagaaaggggtgctgtttcagtcttctacataatgttagctagttattctagcactatttattaaacagaaaattcttcttacgttcctcttgtcagctttgtcaaatatcagatggtcgtaggtgtgcagcattatttctgggctctctattctgttgcattggtctatgagtctgcttttgtaccagtaccatgctgctttggtttctatcaccctgcaatatagtttgaagtggggtaaagtgatacagtgcctccagctttgttttttgtttttttgtttttttaaatttttttattttttttattttattgagacctagtctcgcttaattccccaggctggagtgcagtggagcaatcttggctcactgcaacctctgcctcctgggttcaagcaattctcctgcctcagccccccaagtagctgggactacaagcatgtgccactatgctctgctatcatcatcattattattattattattgtatttttagtagggacggggtttcaccgtgttagccaggatggcttcaatcccctgaccttgtgatccacccgcctcagcctcccaaagtgctgggattacaggtgtgagccaccatgcccagccgctttgttctttttgcttaggattgcattggctcttcgggctttttttgttgttccatatgaatttaaaaacagtttttagttgtgttaagaatgtttttggtagtttgatagaaatggcattatttctgtatatttctttgagcagtatggttattttaatgatactgatttttttctgtccttgagcataaagtagtttttgatttgtttgtgttagttctgacttctttaagaagtgttttgtagttcttgtcgtagagatttttcaccaccctggttagctgtatttctagatattctattctttttgtggcagttgtgaatggaattatgtttttgatttggtttttggctcagatattgtggatgtgcagagatgctgctgatttttgtacatgtattttgtatcctgaaactttgctgaagttgtttttcagtctaaagagcttttgcaccaagactatagggttttctagatatagaatcatgtcatctgcaaacagggttagtttcctttcctctcttcctgttgggatgcctgttatttatttctcttgcctgattgctctagccaggacttccaattctatgttgaataaaagtagtgagagaagtcatccttttcttgtgccagtttttaagaagaaatgcttccagcttgcgtccattcagcaggttggctgttgatttgtcacagatatcttactattttgaagtatgtaccttcaatgcctggtttgtttagggttctaaacatgaagaatgttacattttattgaaagctttatctacgtctattgagataatcttgtgttttttgtctttagttctgtttatgtgatgaatcacatttattgacttgtgtatgttgaacccaccttgcatcccagggataaagcctacttgatcatagcagattagcttgttgatgtgctgctggattcaattttacagtatttcattgaggatttttgcatcagtgttcatgaagaatttttgcctgagttttcttttttttgttttatgtttgccaggttttggtatcagaatgatgctgttactatataatgagcaggggaagagtttcttctcaatttttttagtagttttagaaagtataataccagcttttctttgtacatctagtagaattcagctgtgaatctgtgggtcctaggctttttttggctggtaggctatttactaattcaattttagagcttgttattgttctgttctgggctccagtttctttctgtttggtattgggagaatgtatttgcccagaaatttatccatttcttttagattttttttttagtttgtgtgcatagagatgtttatagtagacttcagtagttatttgtatttttgtggggtcagtagtaatgacccttttgtcatttcctttttttttttttttgatatggagtcttgctctgtcacccaggctggagtacagtggctcgatctcagctcactgcaagctccgtctcccaggttcacgccattcacctgcctctgcctcctgagtagatgggactacgggcacccgccaccatgcctggctaatttttttttatattcttagtagagacagggtatagccaggatggtctcttatctcctgaccttgtgatccacccacctcggcctcccaaagtgctgggattacaggcattgtcatttcttattgtgtttatttgaatcttctcttcttacttcactaaacttgctagtggtttatcttattgatttatttaaaagatttaactcctggatttcttgatcttttgtatgacttcttatgtctaaatctccttcagttctgatctgattttggttatttcttgtcttctgctagctcaggggctggtttgctcttgcttctcttatacttttatttatgatgttaggttgttaaattgagatctttctacctttttcatgtgagcatttagtgctgtaaattccccttttaacctcacattagctgtgttggagagattctggtggtgtgttgtatcactgttctcatttgttttaaagaacttcttgatttgtgccttaatttcattatttacccaaaagtcattcagatgaagattgtttaattttcatgtaattgcatgttttcaagtgtttttctttgtactgaattatatctttttttttctttttttgagatggagtcttgctctgtcgcccaggctggagtgcatggcaccatctcggctcacagcaacttccacctcccgggttcaagtgattctcctgcctcagcctcctgagtagctgggactacagatgtgcaccaccacgcccagctaaatttttatttttttatttttagtagagaaagggtttcactgtgttagccaggatagtctcgatctcctgacatcgtgatctgcccacctcagccttccaaagtgctgggattacaggcatgagccatcgtgcccagccctgtattatatctttatctttatcaagttgtggtctaagtgagcatttggtatgattttgggattattgaatttgctgaggattgttgtgtttctgattgcgtggtcaattttagagtatgtgacacatggtgatgagaaagatatatatactatgttggtttcagatgaagagtttcatatatgtttattagaatgatttggtcaagtgttgagtttaggttctgatatctgctaattttctgcctcaaggtgggaaattaaagaaaataaaattaaattaaaaagagaaagaaacaaggtttcctgtattaggctgacttatcctagaggcagtaacaggcacagcccacatccaggaaaagttttgataacactatttaagaagccagggctggaaagaatgtgctctggagactctcccagcattccctcaacatagggagaagagaaacaaattttcctttctcttatgattcctgtttttcatttaagcagcacattgaaggtcatgagatgcctgagcaggcctggattgcagccacctaggcaccatagtgaaggttataagataagcccatgcaaggcactagagcaagcctaggtaacagccatctgggccacatagtaagagtcatatgtaagtctgagttataaacctgtcatagtatgattaactgcttttgttctgtttctgtatccttgctttcacatcactacactttgtgccactgtaggcttgtttcaagttagcccaccctctttagaagtgtatgtaaaagttaaatgctgtctttgtccttggcccagtctctggatgttaatccactgggtctgagtgcactcaataaaatcctccttttctacctatcggtctttccagtctcctaattcccacaacacagtgatctaagtgtctgcggagtgttgtagtctcctattattgtgtcagaatctacatctctttataggtcttctaagaacttgctgtattcatgtgcacccatgaatttttttttttttttgagacagtttcactttgttgcccgggctggagtgcagtggcatgaactcagctcactgcaacctcctgggttcaagcaattctcgtgcctcagcctactgagtaactgggattacaggcacctgccaccatgtttggctggtttttgtttgtattttagtagagatgaagtttcaccatcttggccaggctggtctcaaactcctgagctcaggcagtccacctgcctcagcctcccaaagtgctaggattacaggcatgagccactgtgcccagccaacacccatggatttttttagaacacctttttctcttctgctttttccttcataaacattctttcaagtgtacacagggtgcccaaggctacaccttagatacctgaatccagtgtctcctaaaattcagatgtccaagggttcagggacatgtccagagacttggttgttgtaggagaaaatataaattagaaataagaggctttattctcctacctgaaaataatggaagatattttgttcttttttcttaaagcatttagattatatgtagatatttttctctgatttttggaaatatatgtaaatcatagtaacagctaaataaaccatttgtcatttttttttgactcaaggttgtctttctctaggacctcataaccattgctttgtttttgctttgggaaaggttttattttattttttcatttttagtcttgtaaagtagacacagagttgtttagattaaagctcattttaagagtacacaaaagttgagcacaaagataataaagactagaaaatactaagttcctttgagagaaaactgattatccagggtaattatctgatatttgcagtccaaagtacttacacagaaaaagcaagagcagttcagtgtataaactgaaaagtggaatctgtagttgtactttggtttctatttattacttcagaacaattaacatagttattatgtgtagtgtttgtcaacaacctgcactcatattaatagcattttctataatagtatgaatataaggccacaatatttactttgaataccttaaataggcacttcaatattgttctttttacttttgaaatatagtgttttaactgaattatggttacagacaatttttaaaagttctacagacatcatgactagtacacaaaaattatttatacatagatatttgtatctaacatcaaaggaaaactcactacaaaattgttacagtagatattagtctgaaatgctcattagtttccccaaaaggactaattatatgtgagcatggtttcagtgtcttatttcactaaatttgaatgctgctattacaggacaaatcaacatgatgagtgatgtggccacccaaaaccataatagctctttagttaactatgtttcaatctcagatacattccactatataaacaaagtcaggttccagttcttatcaaaaagctctagtggaagttgtcacatgtatttcacaatagatcccccatttgatggctaggagataaaagagcaacagacatgaaagaaaaaccttatgaaattctactgagaatatgccctttttcttcataatgctcatgtttctcatgctgacaatagctgtgcattttgggtgttttcagagaaattccttttaggggaatattttctggcctacttgatcaatcttgtatctaatctgagttttcttcttaagatgcttttaacttagtttgttctcagtagaatcttgctgagatggagagctgcttttctctctcatgctttggttgtctgtttcagaaggcctattcatatcctgtggtttgtgtgaattaggtgggctgtcacagtgagaactcttggagcatctgcacttatcctggaaatccagcagtattttttaatgtcacaattataactagaaactgaggctgaaacactgctcccattcccattattatgaaggcacaattctatccaggaggcctacaggatctcctcatgcagctcaggctttactctctgatgtggcactggagtgctgctatggcaattggggttcatgtatgatgtgagctgccagctgtgagccctgtgctgtgagctgtgtttcagtggcagatggtaggagtcgagaggacactcgtcatcaggagagggtaagcaggagtgctctagcccagtgcttagggagtagaggagccattgctttaaaatgtaaatagccaaaaagatagcaccccatccagccatttctgcaggagagtgagagcctaccttcagcagccacctgctttcaagttggaatattacctcctgtcgtgaagataggaaaagtttattttgtcattgactataacccactggcatgcacagatggcctctcaaattaccaggtaaatttaggataaactctgtatgacatggtgctgtaagttcttccacttgtggactaattataatgactatttttctgtctttgcagtctcttaagcaaattgactgtggtgcatgtcacattctggtttacttgcatataaaaactcttttgttctatcattatggagtttctctgcagctggatacaatttttcttttaattatattttccaaacactatctagaattaccatacatgatataaacatattaggtgccagccaggctttactctagagggtacttttcctctcaggcttccagtcaactcacagttgtgctgcaaagtgcatgctgtcactgggcatctctaatcccagcactttgggaggccaagatgggcagatcaccttgaggtcaggagtttgagaccagcttggccaacatggtgaaaccctgtctctaaaaaaatacaaaaattagccgggcatgatggcaggtgcctgcaatcccagctacttggaggccgagacaggagaattgcttgaacccaggaggcagaggttgcattgagccaagatcatgccattgcactctagcctgggcaacagagcgagactctgtctcaaaaaaaaaaaaaagtgtatactgtcccgtaaatatgcaggcagaatcatgtctctttgttatctatagtcctctacagtcacttctagagggattagatttgtacaaatgttacagggtggaaatcaaccattttacctctttcaatgactcttgtgtcttcaaacctgaaactgattaagagaccatggagccaagaaaccaaatcagagtaacacgtgtgcattgagtagacatgtggacatgagaatctccactttccccttcctcctcttggtaaactgctcacaaatgttcaggtaacatctgctactgctactccacctattcaggacctaaatctgcagatggaaattctgaatctaggtcatgagatttggaaaacagaaaatcttttatctgaggaatgcaaatcctctttttaggtcggggcgaaagttattgcggttttaccatttaatgtaatggcaaaaaccacaattacatttgcaccaacctaatagttgtcaaactcggagagacattaaaatgagaacacaattatgtctttctctcctctttgaaccatatagttatctcttgaaattgtttactattgccaccagtggctataaattaaactgatagtgccacactggacactatagcccatactctaaaccctaacgatgtacactcaatcagtaatcaatgttaattctgtaaataaataagaatttctcacagacaaccttttatcaggccacactctgtccctctctctttgcctttgcaaatccacttgtaagtgctgctaattgaagtgtagattccagtcaacttgaatctttgcccgcagtttacaatcctcaagcttggcccaaataaactgcctacttctgttcatgttgcctcatcttctaccttctagatagatgtataatctagagtgtgccagagcagcctctatgaggagatctctcctttgattgttgtgtgcttgctctaatacccaaggatgcagagccaggttgatcccatctaggatctgcacataaggccaggcctcttcttgggatttacaagacaaggccacactttggattcagaatgtaaaaaaaactaacaggaggcatcttctgcattgtgagatgtcaacatgggcattttaaagacatcttttgagagtgtggctctttgagcttttcagatcttgtccaatgacctgcttcagttgtgtgagaggcttctggtataaatagaatctaatgtcagattcagtaagtgtaaacaagcatcgtaggagtgagatcaaggccacaaagtatccagagccataacacaactatacctacctgtaaaatgtgatgctgggccaggcgtggtggctcacgcctataatcccaggactttgggagtccaaggcagacggatcacgacgtcaggagttggagaccagcctgaccaacatggtgaaaccccatctctactaaaaatacaaaaattagccgagtgtggtggcacatgcctgtaatcccagctgttcaggaggctaaggcaggaaaatcgcttgaacctaggaggcggaggttacagtgagctgagatcatgccactgcactccagcctgggtgacagagcgagactccatctcaaaaaaaaaaaaaagtgaacactgtagtagagtattcttgtccttcctcttacccaagagctagcaaatcaggacgggtgatccaggttctggagctctgccagggcagttccattttctatttagaatgagcctgagtctcttctgcctttcttattattgggccatcagcacagggtcactgggaaccctctctcaattagctaggtatatttcagacatttgatgatgtccagagcagaactgtgtcaggatgataagagtggttaattccgcttctgtttcaatgtaagagaaatgaatcatcttgtgtttgtttctttcctcatacaagagatgtgtttggttggtacccagatgagagtttctctagttttctggtactttgggtaaaagacgaggaggaggtctggagactcaaagcagataaactaattgcttcattaatatgaccattagaaaaaaaatgaagcagtcatggtccctaccatccaaaaactcttggtttagactatcaactggataaatggttgaatgaagcatcatatggttggtacaatgaatacgtgtgtgcaaaaaaacttgggctttatttgggccactttctttacattgttgtaacttctgatgtcatcagctgaagggatatttatggacagaagaatttttattattatttctatttttcttaccttgttaagaatatatatttatcttctaataaaattaccctagaaaaccttaagagatttgcttaaattgcttattagtatatgttataaaattgacagcacagtagctaaaaaaaattaaaattacacaaactctggaatttaagtttttcttaggtaagtctaggaaaaacagaactggaagtacccccactggcatagagaacagaattctacacagggtccactctttggcccagttctgttcagattcaccctttttggatgccttattttggtctggccccactctggagccttgcctcacagaactgattagaagagatcagagttttgggtggtatattttgctacctttctagagctggtgctctgatttcgtgaaactcaaaagcagataagtggaaaaatacgtatttttaattttttattaaaatcagtgcttaccaagacattccatttagcaacttgttttctattcctgcagatccagtagttgctccacaagtcacaataaattaaatataaacacaataaaaattcctctaaactacattaaactcttaatttctgtattcctctcatctgtctatatttagcttttattctatacattttattttttaaaaatcaatgacagagaaacagaaaaattaaaattctgggtcctttatctaaatcctgggaattattaaacacttagtaccaactcccagggtgttatgaggatgaaatcacacagtatgttatgcccagcacagtgctctgtaacatactcttgagcacatagtacctgcttaacaaacattgcattagtacctgtgcatatgctatttttcaaatgcagactcattcagacattgctgccttctgtttgttctgtaaactttattttactatttttttcaggtttttgagaagctactttaatctgttatgaaaagagaggtttcttcactttgacttttttttttccataagtcactggtgtacaggtagtatttggttacatgcataagttctttagtggtgatttgtgagattttcgtgcacccatcacccaagcagtttacactacacccatttgtagtcttctatcccttgccctgctcccactcttcccccaaagtccccaaagtccattgtaccattcctatgcctttgtgttttcgtagtttagctcccacatatcagtgagaacagaaaaccttttatctgaggaatgcaaatcctcttgttaggtcggggcaaaagttattgtggttttaccttttaatgtaatggcaaaaaccagaattacatttgcaccaacctaatagttgtcaaactcagagagacattaaaatgagaacacaattacgtctttcctctttgaactatgtagttatctcttgaaactgtttactattgccaccagtggctataaattaaattaatagtgctgcactgtgcactataacccatactctaaaccttaacgatgtatatatacccaattaataatcaattttttttgtaaataaataatttctgacagacaaccttgtatcagcccacttgggggtgtctctcaggtcctgcaggagcagtctgcttccttcagatggtctgtgggtcctcttgggattgctagtttgttcttgcagtcaatctggagctaaaattcacactgtgaacctccacacacttctctgtccaagtcggagctgcaatctagtcctgcctcccatccaccatgactgagcccattccactttggctctttaagtaagtaggccacctgttctgtaaactttaaagagtcagcaaagaatatgatactttagtgtacagatgagttgtcttcatttgtatcagaactttttgtgttgtgacaagagtcctgagtggaagggactctgtgctgtgcctgctttgtctaactaatactaatggtgagcccagggggagttacatcagcaccgatgggacttgtttaaaacactcattttggacccttttcagacctgcagaatcacattatgtagaatggggtcaaaattaccaagtgatttataagctcattacagctcgaggggcaatgctttgccaagtggttatcagccggggtttctaattagaattccacagccaatttacaaaaatctctttacttgtgccctttcaacaggttctgcatagaagcatccatgttgttttaattaagtgcctcatgtgattctaaggtgaggccagaatcaagtatgaaagcttcaagacacattcatgagagttccacctttgcactaaagggtggttacagggcctgttctgtttgggtttggtagggacagggcagtgcagtccatactaccaatattgtagcagaaactgctgttgtctgtggcaggggagggcacctgaggacaggaaagaagaaatgtgtctccatggaacagtgcattgttcctaaatgtctgttattaagaacagaaatgggtggactttttttgcaagtcttgattcttctgcctgtgggtgtggtggcagcaggtaaacaggttctgttgacattttaaaaggcatagtctcaagatgcaggtgtgatttgtttggagcatgtcatctgagcaggaattttacagaaattggaaaaagaagaataaatggcgatttttcagctaatcatgtcccagatcaagagctgtgtccactctgcctcctggactgtcatgcatttagtacttgcaagcctttacttctctacttgtatttttcctccctaatgagtttaactactttttaaaattcttatgatagtcaagggtctctgaaaaatatttccttcctacataccagatctttctctacattctctacatcatagctttttatgtgccatgcagaattctcaccgattataaattaatctgcaatattaaaaatgttctcttgtggctgtgaaacaggaggtgtggatactcaaggtttctattagggaaaggtgggggtcctcagtaaagatggagaacatgtaatgttgaggttccatctgtgttctccattggctttatgcagaacaggattttcaaaatgcttatttaaacaggatggcatttatcacccagaaagttctaaaaaataatatatattaggaggtacctgttctctagagtgctaaaaaaagactactttaaatcattactaaaaattatagaacacttgactgggtgcagtggctcacacctgtaatcttaacactttgggaggccgtggtgggtggataacttgaggtcaggagttcaaaacctgtctgaccaacatggtgaaaccccatctctactaaaaatacaaaaattagccgggcgtggtggcaggtgcctgtaatcctagctactgtggaggctgaggcaggagaatcgcttgaacccaggaggtggaggttgcagtgagccgaaattgtgccattccactccagcctgggggacagagtgagactccgtctcaaaaaaaagaaaaaaaaaattacagaacccatgagtcatcagtaccttaaactttgaataaaactgatgtttctttatggttaaattcagactgtaatctacttttaggtagcaagatcacatcagtgaggctatgtctttctgtatgcaccagcacatcataaaaatttgtcctagtgcagttgatgttaatgattcacttggttaaagaactctctgacagactgttttactatagagttgattattttttctttattattaactatctttatgcagctgatgccatcacatttaatctggcagctgcccttcttccttaggttttctttgcatatatctgtctttggaaaatgaaagctctcatctttgtttacaggacaaaaaaactgggaaaaacacagcttccttcatttactgaatgtttgacaaaatattctttttggatcaaaaacattggcattactggtgagcttgttagaaattcagcaactcagactttattccagattttctgaaaaaataatctgcattaacaaaatcttcagttcattgaacacattaaaatgtgagaggtaaattctaactcaacatgtctttttgatctgaaaaatatacacaactcattctgtaagatgtaaacatagcactcaaaaatgtatgtttctgttcatgcccttaattttatactttatcacttagaaaaatgtcatgtgtacactgatgttgtggatcttatgccactattttctcaaagttagagaatatattagagaacatttctgtttataaattagtttattgaataatttcagtcacttgtataagtcagaagcagttctctttactctctcatttcaccttgaattaaataaaaaattctacccatgggcacttggtcaatatatttctctctctttctctctccttctgttggtgtgtgtgtgtttcagggaccattgacatttacagatgtggccatagaattctctctggaggagtggcagtgcctggacacagcacaacagaacttatatagaaatgtgatgttagagaactacagaaacttggtcttcctgggtgagaataacttcaatacaacattcctaatataccctaaatgtttcatttctcctctttgtagaatgttctttggtaatttatgctttgcataaatgagtttcagattcctgcttttaagaaaagtttggggccgggtgtcttggctcacgcctgtaatcccagcactttgggaggccaaggcgggtggatcacgaggtcaggagaccatcctggctaacacggtgaaaccccgtctctactaaaaatacaaaaaattagctgggcacagtggcaggcacctgtagtcccagctactcgggaggctgaggcaggagaatggcgtgaacccgggaggtggagcttgcagtgagcggagatagcaccactgcagtccagcctgggcaaaagagcgagactccatctcaaaaaaaaaaaaaaaaaagtttggggatttgttcatgtagaaaagaatttcttcaagatgttttgtcttcacctgaactttccatattcctgagctgatttgtattatgtactcttgattagtgataatttcaggaatttggtggcctaaaatattgttgcccacaccttaaaatctaattgtcacaatcgattttttattaagtagtactgggcaatgaaattaagaacctaaaaattttaaatattttctaaagatttagaaatttctcttataaattggtatttgggcattaatttactagaatattatattacatcctctttactgagcacattactaaattggtaattacagaatataagcaagattcatcttctttatttttaataaaacaggtattgctgtttctaagccagacctaatcacttgtctagagaaagaaaaagaaccctgcaagatgaagcgacatgaaatggtggatgaacccccaggtaggtgagagtgaacacaacagacaacacagatgagaggtcccaaggccaataagaaagccagtccttaacaatgtgatttgggaagctatgtttcaaagaaaatattttctgaaaaactgtgttctaaaaaactttcagcctggcacagtggttcacacgtgtaatcccagcactttgggaggctgaggtgggcggatcacctggggtcaggcatttgagaccagcctggccaacatcatgaaactgcatctctactaacagtacaaaagttcactgggcatggtgtcacatgcctgcaatcccagcttctcaggaggctgaggcaggagaatcgcttgaatctgggaggcggaggttgcagtgagctgagatcacatcattgcactccagcctgggcaacaagagtgaaactccatctcaaaaaaaaaaaaaaaaaaaaaaaccaaaaaaaaaaaaacacccgtcttggtgactgccctacagagcaaagtcctgaagaatattcattctgttgaaaaataaaatggggattaacaactaccaaaaccccttgtaacaagccaactaaaggtggaccctagtacagaccccgcagccttgtgaccaagctacaacccctctctattacaaatccatagggcatctcagcaccctggggacccaacaaaagaggcttacctcctgaggccagtttataaaaaattgaagaggtgtctgcttcttcacattcacagacaccaatgcaaaactgtattgtacccattgttaatgcctctattttaatatagtactggaagtatgtggcataaatattagtcaaaaaaatagaaaataggctgagcacggtggctcatgtctataatcccagcacttcaggaggccaaggcagctggatcacctgaggtcaggagttccagaccagcctggccaacttggcaaaaccctgtctctactaaaaaatacaaaaattagctgagcgtggtggcaggcacctgtaatcctagctacttgggagactaaggcagggagaattgcttgaacctaggaggcggaggttgcagtgagccaagctcatgccactgcactccagcctgggtgatggagtgagactctgtctcaaaaaaagaaaaaaaaaaaaagcattgaaattgaagacaagtaaaaagttgctgtttgtagattatgtaatctgacattaaaaaaccataaacagtacattaaaacctgtctaaactagtaaatgcccttagtatattagcaacatacaaaattaacatacaagtataagttatggttccatacacttaaactatctgatagaagagaggaagaaaacaatcttatttacaatagcattagagtaataaatttctgaaaacaaatttaaccaaggaggtaaaaagtatttacaattaaaaatatatcaatgaaagaaatttaaaaagacgtaaattttaaaatattttgtatctatggattgaaacaataaatatttttgaagtgccatattattcaaagtgatctatagattcagtgaattcccaatgaaaatttcagtgttttttttttcacagaaatgcaattttaaaatttacatgaaactacaataaactttgactagccaaagcaatcttgaggaaaaagaaagcaaaagaacatcatacttcataatgtcaaactatatttcaacactatagtaatacaaacatagtggaatgtgcagaaaaattaacaaaaaaacactactggaacagaaaccactactctcaaacattttagacataatacaaaaagagaatctaaaaagtagtttaacaaagagtttttcaaaattaggcagatacttgtttgtcccccaaaacaatgaaaaagcagtcagattatgcagtatattatatgccatgaagagggttttggctcactgtaagcttgaacaaagatcactgaggggaaagtagaatccttaaaaaatataaaagcataagacagaagatgcctctatgtgagaggattttttttttttttttggagacggtggtctcgctttgtcacccaggctggagtgcagtggtgcagtcttggttcactgcaacctcggcctcccgggttcaagcgattctccaacctcagcctcccaagtagctgggactacaggtgtgtgccaccacacctggctaattttgtatttttagtagagacagggtttcaccctgttggccaggctggtcttgaactcctgacaggtgatctgcctgcctcggcctctcaaagtgctaggattacaggcatgatccaccttgcccggtccaaatttttttttttttcatttctaagtatttgagaaacataacattttaaagtaatggctgcattcttgttttccacaatgaacatgggtttcattttcattgcatcatcaacagctttggtgtttttaaaaaaatttacagtttccattcttaatggatgtgaggtgattttggttttcattgttattttcatgcatatctctacaaattagtgatcttgtgttcttaaatgctttttttccagttgtgcgtcttttttgatgaaaatttagttcagttgttttcccattttaaaatcacattattcaactttattgtttagtttcaagaggtgtttatatattctgaatattaaatcatatccatgtgatttgcatacattttcatccatttcctaagagacattttcactgtattgaacgttttctctgatgtgcagaaattttttagtgcagttaaatttttctattttctttcttgctcatacatttaatgttgtatctaagaaaatgcggccaagtccaatgtcatgtctttcttctatatttttttctaagggatttgttagtggttctttttttttttaatgtccaagtattttatttaaaatgttttttgtatatggttcaaggaaaggacccaactttattttaccagtgtttcttttgttttttttcaatacagagtcttgctctgttgcccaggctggagtgtaccggtgtagtctcagctcactgcaacctgtttcccgggttcaagcaattcttctgcctcaacctcccaagtagctgggattacaggtgtatgccaccacacctggctaatttttttgtatttttagtagagatggggtttccccatgttggctaggctgtattgatatccagtttccaatattattttttaaagagattttcttttctctgttgtgtgctcatggcacacaacagatcatatacagaagggtatatttctgtgctgtgtattctattctttcatctttcatctgtcttgtcagtaccacattgtttttgttactgtagcttttaatatgttttgaaatcaaaaagtataatgcctctttattctttttcatgggtgtttggctatagtttatgatcaaattttacaattttaaacaatatttctgtaaaaaactgtgctattgggattgtttagggattatattaaatgtgtttatcactgtctgttgtattgacatatttgaaaaattaaatttttgacccctaagcaagaaaatgttgaagagcatgttttattttcatatatttttggattttccagttttacttttgcttttagttcctagttttatttagttttggccacaaaacatagtgtgtaattttggtcttttaaattttatttgttgttttgagacaggagcttactctgtcacccaggttggagtacagtggcatgattttggctcaacgcagcctcaacctcctgagctcaagtgatccttccatctcagtctcctgactacagacatgcactaccatgtctggctagtgcagtttttaattatttgtagggacaggatttcactatgttgcccaggcctggtctcaaacttgtggctccaagtgatccttccaccttggtgtctaatgtgttgggattaaaggcatgacccactgtacccagccaatattcctaaatttagtaagacttgatttgtgtcctaacagaatacaccaggtgcaaataaggatattttgcttttgactggagagaatctcttgctttcagctggaaagttgttttttgtgtttttttttttttgttcgtttgtttgtttttttttgagacggagtatcgctctgtcgcccaggctggagtgcagtggcgtgatctcggctcactgcaggctccgcctcccgggttcacgccattctcctgcctcagcctcccgagtagctgggactacaggcatccaccaccacgcctggctaattttttgtgttttttcttttttttttttttttagtagagatggggtttcaccgttttagccgggatggtctcgatctcctgaccttgtgatccgcccgcctcggcctcccaaagtgctgggattacaggcgtgagccaccgcgcccggccttgtttttattttttaaagaagtgtattcatgtatcatcctaatagtcagtaatcacttgctacacctgttccctgtctgtggtactgcagtcactccactcctgtaacatttacctttggtctcagcagactcaaactctcattgtgaagtataccaccatttctttccttctttctttctttctttctttctttctttctcttttcttttctttcctttcctttcttttcttctttctttctttctttcttttttactttctttctttctttctttctttttcttttctttctttctttctttctttctttctttctttctttctttctttctttctttctttctttctttctttctttctttctttcttctttctttctttctttccttctttttctttttttgagacagagtcttgctctgttgcccaggctggagtgcagtggtacggtctcagctcactgcaacctccactttctgggttcaagtgattctcctgcctcagccttctgagtagctgggattataggtgcctgccatcacgcccagctaattttttgtatttttagtagagacagggtttcaccatgttggccaggctggtttcgaactcctgactttatgatctgcccgccttggcctccaaagtgctgggattacaggcatgagccaccgcgcctgaccaaagtataccaccatttctttcagcagtttatgttgtgggaagctaaatccagcatctggtaatatcctagaagccagaaataaagatgtatgtgccaatatatttcttgtcttttaaaaacaaaatgaggagctggcaatttacttccaaaggcactgtgttttattggggaacaggaagagctgtgttgggtaactgtaacagaaatgtttttcattctatgtgactctttgcattgtactcacctggggcgttgtacacatataacttattgataaattatccactaatatattttggttagtatgtctttgttatatttatatgtttatgaagaaattagaatctggtattttgctatgctgtgttgcttacgtagtttttataactttagaggttttgtttgtgacgtatatatatctgagtctagtaagtgaagtaatttgttgttttaattttattttagttgtgtgttctcattttgctgaagacttttggccagagcaagacataaaagattctttccaaaaagtgacactgaggagatatgataaacgtggacatgagaacttacaattaagaaaaggctataaaactgtaggtgattgtaagctatacaaaggaggttataatggacttaaccaatgtttgacacttacccagagcaaaatgtatcactgtgatatatatgtaaaagtcttttatgcattttcaaatgcagatagatacaagacaagacatactggaaagaaacctttccagtgtaaaaaatgtggcaaatcattttgcatgctttcacaactaactcaacataagaaaattcatattagagagaatacctacagatgtaaagaatttggcaatgcctttaatcagtcctcagcccttactaaccataagagaatttatgttggtgagaaacactacagatgtgaagaatgtggcaaagcatttaaccactactcaacccttactaaccataagagaattcatactggagagaaaccctacaaatgtaaagaatgtggcaaagcctttagcaggtactcaacccttactacccataagagaattcattctggagagaagccctacaaatgtgatgaatgtggcaaaacctttagcatatcctcaacctttactaaacataagataattcatactgaagagaaaccctacaaatgtaaagaatgtggcaaagcctttaaccggtcctcaacccttactagccataagagaatacatactggtgagaaaccctacaaatgtgaagaatgtggcaaagcctttaactggtcttcaactcttactaaacataaggtaattcatactggagagaagccctacaaatgtgaagaatgtggcaaagcttttaaccagtcttcaagacttactcgacataaaaaaattcatactggagaggaaccctacaaatttgaaaaatgtggcagagtttttacctgttcctcaacacttactcaagacaagaaaattcatactggagagaaaccctacaattgtgaagaatgtggcaaagtttttacctattcctctacacttactagacataagagaattcatactgaagagaaaccctataaatgtaacgaatgtggcaaagcttttaaccggtcctcacaccttactagccataggagaattcatactggagagaaaccctacaaatgtgaagaatgtggcaaagcctttaagcagtcctcaaaccttaacagtcataaaaaaattcatagtggagagaaaccctacaaatgtgaagaatgtggcaaagcttttatcctgtcctcaagacttactcaacataagaaaattcatactggagagaaaccttacaaatgtgaagaatgtggcaaagcttttaaccggtcctcaagacttactcaacataagaaaattcatactggagagaaaccctacaaatgtaaacaatgtgacaaagcttttacccactcctcaaaccttagtagtcataagaaaattcatagtggagagaaaccctacaaatgtgaagaatgtggcaaagcttttaatcggtcctcaagacttactcaacataagaaaattcatactagagagaaaccttacaaatgtgaagaatgtgccaaagcttttacccggtcttcaagacttactcaacataagaaaattcataggatgggtgtggtggctcatgcctgtaatcccagcactttgggaggcagaggtgggcggatcacgaggtcaggagatcgagaccgtcctggctaacatggtgaaaccccgtctctactaaaaatacaaaaaaaaaaaaaaaaaaaattagccaggcgtggtggtgggcacttgtagtcccacctactcgggaggctgaggcaggagaatggcctgaacccggaggtggagcttgcattgagccaagatcacaccactgcactccagcctgggtgacagagccagactccatctcaaaaaaaaaaaaaaaaaaaaaagaaaagaaaattcataggccaggtatggtggctcatgcctgcctgtaatcccagcactttgggaggccgaggcgggtggatcacgaggtcaggagttcaagaccagcctggtcaacatggtaaaaccccatctctactaaaaatacaaaaattagctggatgtggtggcacatgcctgtagtcctagctacttgggaggctgaggcaggagaattgcttgaacctgggagccagaggtagcagtgagctgagatcacgccactacactccagcctggatgacaaaacaagactctgtctaaaaaatatataaataaataaaagaaagaaaattcatagtagagagaaaccttacaaatgtgtagaatgtggcaaaactcgttttaactaatgctcacatcttattgcatagaaaagcatttatacctgaaaaaaggtatacaaatttaaaaaatgtggaaaagccattaaaatctgttcacatcttaacaacagagagttgatacttaataagagcattgtaagtgcaattactgtcaaacaatcttgtagaaaatatcatcctttaaagtgaatgagactagtctgaggaaaaacattacaaatgtaaagagggttatagtgcatttacttgtatcacagatcttgttgtacacattttatactagaggaaaaccctgaagcagttgcaccaactttgttcaacatcagaaatttatattggagaaaaatccagcaagtgtaataaatttggaaaaacttttttttccccaaaaactatacctcaggaaacaatggagagtttatattaacatatatttttgcatatggccatatgtataaaaatatttaattcaaaattgaatttaaaaagtctacataaatatcatacatagatatgtatgatattgaatacatgtattaaatacatagaatatgatatttaatacatagaaaagtctacatgaatatcagaatttacagtagaaacaactaagacacaaacacttgagacattacactaaagtgctgagtatagaaaataaaactaaagttgttaaattatttgtatataacttttaaaagagtggaagatattttgcaaagttatattcaaagtgtactttttatttatttttttgagatggagtctcactttgttgcctacgttggagttcagtggcacaatttcagcttgctgccaacttcgacctttgggttcaagcagttctcctgccacagcctcctgagtagctgggaatacaggcatacaccagcatgtctggctatttttttttttttttgtatttttagtagagatgagatttcaccattttgtccagggtggtctcaaactcttcatctcaagtgatctgcccaccttggcctcccagagtgctgggattgcagccatgagccactgcacccagcccaaagtatgcttttaaaaatatgtatatatataaaatttttgaaaagcaaattatgatataattcaagtatcaaattacttcatgctgtttcattgttcctattcacatgtgaaagcatgtgatcaattattgctgcatcacatatagactcattaggtggaaattatggcctcttctgtaaaaaagtaaggacattaaaatgtaagatgcttgatgaaaatctaagtggagaggctctttgtggttaacttattgagtgatgtatgaggtcgatgttcagagtaatatgcctctgtattacagtgatagaaaatattttttagttaaaagtgaatttataataaaattgtaaatcattttagtgattgagcttttatgttataaaatgcagtatatttcaaaatttttaaattatatgtaaatttgattttatttgttaccatgttaagactattgtgcatttaatgaagcattattatgctatcaactttaacctatcccacgttactcaagggtgtagctaaatgaaggtagcagtatgctatttagtaacatagtggaatagcatctctagtaatctcttttgccagtagctttaactggcagataagttaatattgttcccataggttaaatatttatcctttttttgatatttaaatttttttcttatttttttgtgggtacataatatgtgtatatatttatgcaaatctggcatattttgatagaggcatacaatatgtaataattacatcaattacatcagggtaaattatgtagccattacttgtaacatttatcttttacaaacaactcaattatgcacttttagttattttaaagtgtacaattaaattgctattgactgcatggttatctttgtggtataaaaatttatatataagtataaataaactcatttctgagtcttaaatagatattttcaattatttgtaatatatttttatttgaacatttggcctctctgcctgcaaacacacacagacttttagctttgatttacatagagttaaatgtacacatgtgtggctgtaaagataaatcttagatgtaagaaaattatacagttattaagtgtctttgtgtgaatacacctaatttttttgaagagtaatattggaacaaaaagaatcattttattaaggttgctaatatactagaaaacaaaaaacctcaaaaatgctgaaagcaaatctatactctctttttattgaatttattactgtaaaattttatggctatagttcagaatctccccatgcaaattctctgtatttatttgcctggtactcatgctaggcccttaatttttttgtgtgttttatatattttttgttgtatagtttatgaagtattcattatgtgagctggtcagagattataataaattttataaaattgagtaatgcacacaagataatttttagatataattttaaaatagtgtatttacattttatttagttagggcattccattttattaactggagaaccctatataagcattttttaaaaattattgcttcttttcacttttataagtgacaagtaaatttattaattgagtcaatttgttcaggtaagtactagggagacttcataagtcatgaggatgtttttatatataaatgtagcaaacaaatatgaaagttcctcctgtgtcacagacgctccataataagccataaatattcctgctggagttagtttgtattttcaagtcagagatgaaaaatatccatggtgaagaaatcttcatgtggcgaaggcatttttgtccaggctgcaaagctgactcttaatgaatttaaagagaaattttgcttctcttgtttcttatcctgttttgtttgtcttatgtgtattccaaggttgtatgcattacaatgaactacagtacttcttttactgtgttatggcaacagttttctcactgttgtcttcatttcacatggtactttgaaggttctaatgagaaagttttgttttgttttgttttgtttgagatggagtttcgctcttgttgcccaggctggagtgcagtggcacgatctctgctcactacaacttccccctaccgggttcaagcgattctcctgcctcagcttcctcagtagttgggattacaggtatgcaccaccacgcctggctaattttgtatttttagtagagacggggtttctccatgttggtctggctagtctcaaactcccgacctcatgtgattcgcgcaaagtgacttggcctcccaaagtgttgggattgcaggagtgagccaccacacctggctgaaagtttattttttaatgcactgaaaaagtggttttaactggggaatttgcttatcaatataacttttggattgataaaataagaggcacacgtttttcctgggtgagagaattacatcacttagcattgtttgtctgtaaaagaaaaatctttatgtattttatttttttgagatggagtcttgctcttgtcacccaggctggagtgcagtgatgcagtcttgactcactgcaacctctgcctcctatgttgccgcaatctcctgaatagctgggattacaagcacccgcaaccacgcctggttaatttctgtattttagtagagatggggtttcagcctgttggccaggctggtctagaactcctgacctcagatgatctgcccgcctcagcctcccaaagtgctgggattgcaggattgagtcactgtgcctggctggaaaaatctattagattcttacacaaagtgtggtaaatatcaattttgttagaaactcattttgtattccatttttttgtttgtttgtttctttgtttttgtttttttgagatgaagtcttgctctgttgcccaggctggagtgcactggcaatatcttggctcactgcaaccttcacctcctgggttcaagtgcttctcctgtttcagcctcccaagtagctgggattatgggcctgcgccatcacatccacctaatttttgtatttttagtagagatggggtttcaccatgttggccaggccgatcttgaactcctgaccccaagtgatccacccaccttgtcttctgaaagtgctaggattacatgcgtgagctaccatacctggccaggaaccatctttgaagttatatttttttttttccccttttgagatggagtctcgctgtattgccgaggctggagttcagtggcatgatcttggctcactgcatcctccacctccccagttcaacaattctcctgcctcagcctcctgagtagctgggattacaggtgctcaccaccacacccagctaatttttgtattttttgtagagatgggtttcactatgttggtcaggctggtctcgagctcctgaccttgacgtgcactctttgtggacaccaggacacaaactctctgtggagtcagcaagcaaaacgacagcggaacacaacagcagaagacccagagacagaacatgcatacagggtgtgaggaggggagctcaggtcaaacttcacattgtccagagagacagcaaattagaggaggaggaaggtgatcagcaggagagacatctgcagggaaaaaaatgtaacccagagataatttaaagttttttaaacaaatgaaaaatattttagggcaagtgtaagttaagaggaggtatttcagcaagacttagcattagacataaaatcaaactaatatggactgcaataattgttaaagaaatttgtattaactagttgataaaatcaatgtatactgcttggatctgcagtgaacgatagttaaccactttgcagcgtttactgactacagttttaggtaaaaattacgctattagtattccaaattactagagggatggggaagggaagttgacagaaaagtggttctcaagtgtatgttagtattgaagggtaatttgtagagcttatatggtttaggttcaaatggagaaagaatgatttaaaaactgagagggggagaagaactaggctgtataaaaaactgcggccaggcacggtggctcaggcctcccagcactttgggaggccgaggtgggtggatcacctgaagtcaggagtccaagaccagcctggtcagcatggtgaaaccccgtctctactaaaaatacaaaaattagctgggtgtggtggcgcatgcctgtaatcccagctacttgggaggctgaggcaggtgaattgtttgaacctgggaggaggaggttgcagtgagctgagatcactccattgccctccaaactgggcgacgagcaaaacttctctgaatgaatgaatgaatgagcaaattgagatcccctgaagcagcagatgctgtgaaactggatgttctagtaccaaacataacaaaggactaataaagaggggaacaaatttaaaatagtttatgtgtcgactagtttatgtatctaaaaagtaaaaattaggccaggcgcaatgcctcatgtctataatcccagcactttgggaggccgaggtgggagtatcacctgagattgggatttcaagagcagcctgacagagaaaccccgtctttactaaaaatacaaaaattagctgggtgtagtggctcatgcctgtaatgccagtcactcgggaggctgaggcaggagaatcgcttgaacccgggaggcagaggttgtggtgagtggagatcatgccattgcactccagcctgagcaacaagagtgaaactccatctcaaaaaaaaagataaaaattaggagtcgatttcaccatatagtttaaaacaaattcatagtttttttttgtttgtttgtttttttgagactctcactgtcacccagactggagtgcagtggtgcaaccttggctcaatgcagccttcatctcctgggttcaagtgattctcctacctcagctttctgagtagctgggattacaggcatgcgctaccacacccagcttatttgtgtatatttagtagagatggagtttcaccatgttggccagacatgtctcaaactcctgacctcaagtgacctgcccgccttggcctcccaaagtgctgggattacaggcatgagccactgtgcccagcaagaattttgtaatgcatttatcctgaatatacctgcttagcaaaataccataattttctacatacatttctaaatacatttaggcttattttctacaaatattattctggacatcttataaatgctaggaacactctggaagaatgaatgtattgagttttacagtatttcaggtatctacctagagtattaaatatttcttgttttttgtttttttgttgtttttttgagatggagtctcactctgtcgcccaggctggagtgcagtggcgcaatctcggctcactgcaagctccgcctctcaggttcacgccattctcctgcctcagcctcccgactagctgggactacaagcgcctgccaccgtgcccggctaatttttttgtattttttttttagtagagacggggtttcacggtggtctccatctcctgacctcctgatccgcccacctcggcctcccaaagtgctgggattacaggcgtgagccaacatgcccggcaaatatttcttaatcaaaatccaatctctaaggaatctatttagaaattttagtagattctaataaaaatgttttcctggaatattttgtgaggcgcattatgcagatcctggaaatattaagcgaattaaagcctctaagcctttttttttttttttttttttgagatggagtctagctctgttgcccaggctggagtgcagtggtgcaatcttggctcactgcaacctctgcctccagggttcaagcaattctcctgcctcagcctcccgagtagctgtgactacaggtgtgagctaccatgcctggctattttttggatttttagtagaaatgggtttcaccatgtttgccaggctggttttgaactcctgacctaaagtgatctgcccacctccacctcccaaagtgctgggattacaggcatgagccaccacgctcagcctccaagcctaaatttttttattttcctgaatgcaatttaaggaattttatttcctgaatgcaatttaaggaattttaaattgaccatttgtcaatttaaaagggtactaaggctataagaactcagtcatatggacgcacacacagacacacagaaaatattaatcaggtaagttgtgacatcaagtaggcaaaaacccaaattatttctgaaaagtttcctagttcgttttaatatttcaatattcttctgaatattctactttttgccatttttttttgcttccctctttgctatataaatggaaggcaacacacatcctattgttgagctcttcaaagaagccttggatagagaatatgaagactattccagatttttctttgagtgtagacatctttgacagttttcaaattaaagaagtatacaggacaggtgcggtggttcacatttgttatcttaacactttgggaggctgagtcgggtggatcacctgcggtcaggagtttgagaccagctggaccaacagagtgaaaccacagctctactaaaaatataaaaattagccaggcatggtggcatgcgcctgtagtcccagctacttgagaggctgaggcaggagaactgcttaaacccgggaggtggaggttgcagtgagccaagatagcaccactgcactgcagcctgggagacagagtgagactctgtctcaaaaaaaaaaacaaaacaaaaaaactacaactagaaatactctattatgtaggatacatggtactgtctttataacaattatctttgcttcagtttttttaaattacttttattactaagtttggaaattttgtttacttaagttattgtcagcacaggctaatttcaaactgtaatattggaattaacagagttttgtaaggatttttgtttctgcaaaatgtcctcaatgtatgcacaagtttttatatcctagaaacaatgttaattaggggacttttgtgtaaaattggtcttcaacggggttcaaatcgtggtgtatatacatatataaatatatatatatataaatatatagatgattttattttttatgtttttaaatttaaattttttaatttctgtgatacatgtgcaaaacatgtaggtttgttacatatgtatacatgtgccatggtggtttgctgcacctatcaacacatcatctaggttttaagccccacatgaattaggtatttgtcctaatgctctccctcccattgccccccacaccctgacaggccccagtatgtgatgttccccttcctgtctccatgtgttctcgtcgttcagttcccacttatgagtgagaaaatgtggtgtttgattttctgttcctgtgttagtttgctgagaattatggcttccaatttcatccatgcccctgcaaaggacatgaactcattcttttttatggctgcatagtattctgtggtgtatatgtgccacattttcttatccagtctatcattgatggacatttgggttggttccaagtctttgctactgtaaagagttctgcaataaacatgtgtgcatgtgtgtttatagtataatgatttataatcctttgggtacatacccagtaatgggattgcttggtcgaatggtatttctggttctagattcttaaggattgccacattgtcttccacaatggttgaactaatttacagtcctaccaacagtgtaaaagcatttctccacagcctcacgagcatctgttgtttcctgactttttaataattgccattctaactggcatgagatagtatctcattgtggtttgatttgcatttctctaacgactagtgatgatgaactttttttcatacgttttttggccacataaatgtcttttgagaaatgtctctttatatcctttgcccactttttgatggggttgtttttttcttataaatttttttaagttccttgtatattctggatattagacctttgtcagatgagtatcttgcaaaatttttctcccattctgtaggttgcctgttcaccctggtgatagtttcttttgctgtgcagaagctctttagtttgattagatcccatttgtcaattttggcatttgttgcagttgcttttgtgttttagtaatgaagtctttgcccatacctatatcctgaatggtactacctagattttcttctagtgtttttgtggtttggggttttacatttaagtctttaatttttcttgagtatatttttgtataagttataaggaaggggtacagtttctgttttctgcatatggctagccagctttcccagcaccatttattaaaaagggaatcctttccccattgcttgtttttgtcaagtttgtggcagataagatggttatagatgtgtggtgttatttctgaggtctctgttctgttccattggtctatatatctgttttggtaacagtaccatgctgttttggttactgtatccttgtagtatagtttgaagtcaggtgacgtgatgactccagctttgttctttctgcataaaattgtcttgactatacagattctttttttggttccatatgaaatttaaagtagtttttttctaattctgtgaagaaagtcaatggtagcttgatgggaatagcattgagtcataaattactttgggcagtatggccattttcatgatattgattattcctatccatgagcatggaattttttcccatttgtttgtgtcctctcttatttccatgagcagtgttttgtagttcttcttgaagaggtccttcacatcccttgtaagttgtattcctaggtattttattctctttgtagcaattgtgaataggagttcactcatgatttggccctctgcttgtgtattgctggtgtatagaaatgcttgtgatttttttttttttttttttttttttgagacagagtctcactctgttacccaggctgtagtgcagtggcatgatcttggctcactgcaacctctgcctcctgggttaaagcgattctgttgcctcagcctcccgagtaggtggacctcagatgatccacctgcctcagccttccaaagtgctgggattacaggcatgagccaccatgaccagccaaatgcttgtgatttttacacattgattttgtatcctgagattttcctgaagttacttatcagctcaaggagcttttgggtggagacgatggggttttctaaatatacaatcatgtcatctgcaaacagagacaagtttacttcctctcttcctatttgaataccccttatttatttctcttgcctgattgccctggccaaaacttccaatactatgttgaataagagtggaggagccaggtgcagtggctcactcatgtaatcccagcatttggggaggccaaggcgggtggatcacctgagattgagagtgcaagaccagcctgaccaacatggagaaactctgtctctactaaaaatacaaaattatccaggcatgttgtcatacgcctgtaatcccagctactccggaggctgaggcaggagaatcacttgcacccaggaggcagaggttgtggtgagccgagatcatgccattgcactctagcctgggaaacgagtgaaactccgtctcaaaaaacaaaagagttgtgggagatggcatccttgtcttgtgccagttttcaaagtgaatgcttccaccttttgtccattcagtatgatattggctatggatttgtcataaatagctctattattttgagatatgttccatcaatacctagtttattgagagtttttagcatgaaggggtgttgaattttatcaacagtcttttctgcatctattgagataatcatgtgttttttgtcattggttctgtttatgtggtggattattttattgatttgcatatgttgaaccagccttgcatcccaaggatgaagccgacttggtcgtggtggataagctttttgatgcgctgctggaattggtttgccagtattttattgaggattttcacttcaatattattcagggatattggcctgaaattttctttttctgttgtgtctctgccaggttttggaatcaggatgatgctggcctcataaaatgagttaggaaggagtccctcttcttccattgtttggaatagtttcagaaggaatgataccagctcctctttgtatctctgatagaatttggctgtgaatccatgtggtcctgggctttttttggttggtaggctattaattactgcctcaatttcagaacttgttattggtctattcagggatttgacttcttcctggtttagtcttgggagggtgtgtgtatgtgtccaggaatttatccatttttttctaaattttctagtttatttgcaaagaggtgtttatagtattctctgttggtagtttgtatttctgtcagatcagtggtgatatcctatttatcatttttattgtgtctatttgattcttctctcttttctttattagtctagctggcagtctatgtattttgtctatgttttcaaaaaacagctcctggattcattgattttttgaagggttttttgtgtctctatctccttcagttctactctaatcttagttatttcttgtgttctgctagcttttgaatttgtttgttcttgcttctatagttcttttaattgtgatgttagggtgttgattttagatcctttcagctttctgatgtgggcatttggtgcaataattttccgcttaacactgctttagctgtgttccagagattctggtactttgtctctttgttctcattgctttcaaggaacttctttatttctgccttaattttttctttttctttttttttttttttattgatcattcttgggtgtttctcacagagggagatttggcagggtcataggacaatagtggagggaaggtcagcagataaacaagtgaacaaaggtctctggttttcctaggcagaggaccctgcggccttccgcagtgtttgtgtccctgggtacttgagattagggagtggtgatgactcttaacgagcatgctgccttcaagcatctgtttaacaaagcacatcttgcaccgcccttaatccatttaaccttgagtggacacagcacatgtttcagagagcacagggttggcggtaaggtcatagatcaacaggatcccaaggcagaagaatttttcttagtacagaacaaaatgaaaagtcttccatgtctatttctttctacacagacacaacaaccatccgatttctcaatcttttccccacctttcccccttttctattccacaaaaccgccattgtcatcatgacccgttctcaatgagctgttgggtacacatcccagatggggtggtggccgggcagaggggctcctcacttcccagaaggggcgaccgggcagaggcgccccccacctcccggacggggtggctggccgggcgggggctgaccccccacctccctcccggacggggcggctggctgggcgggggctggccccccacctccctcccggaaggggtggctggccgggcgggggctggccccccacctccctcccggatggggcggctggccgggcgggggctgacccccacctccctcccggatggggtggctgccaggcagagacgctcctcacttcccagacggggtggctgccgggcggaggggctcctcacttctcagacggggcggctgctgggcggaggggctcctcacttctcagacggggcggccaggcagagacgctcctcacctcccagacggggtcgtggccgggcagaggcgctcctcacatcccagatggggcggcggggcagaggcgctccccacatctcagacgatgggcggccgggcagagacgctcctcacttcctagatgggatggcagccgggaagaggcgttcctcacttcccaggctgggcagccaggcagaggggctcctcacatcccagacgatgggtggccaggaagagacgctcctcacttcccagaaggggtggcggccgggcagaggctgcaatctcggcactttgggaggccaaggcaggcagctgggaggtggaggttgtagcgagccgagatcatgccactgcactccagcctgggcaccattgagcactgagtgaacgagactccgtctgcaatcccggcacctcggggggctgaggctggtggatcactcgcggttaggagctggagaccagcccagccaacacagcgaaaccccgtatccaccaaaaaaaatacgaaaaccagtcaggcacggcggcgtgcgcctgcaatcgcaggcactcgtatttctgccttaattttattatttacccagtagtcattcagcagcagattgttcaatttccatgtagttgtgcagtttggagtgaatttcttaatcctgagttctaatttgattgcactgtcatctgatagactgtttgttatgatttcagttcttttgcatttgctgaggagtgttttacttccaattatgtggttgatttcagaataagtgctatgtggcactgagaagaatgtatattctgttgatttggggtggagagttctggagatgtctattaggttcgtttggtccagagctgagttgaagtcctgaatatccttgctaattttcggtcttgttatctgtctaatattgacactggggtgttaaagtctcccactattattgtgtgggcatctaagtttctttgtaagttactaagaacttgttttatcaatctgggggctcctgtattggctgcatatatattaaggatagttagctcttcttgttgcattgatccctttaccattatgtaatgcccttctttgtcttttttgatctttgttggtttaaagtctgttttatcagagactaggactgcaatccctgcttttttttttttctttccgtttgcttggtaagtaaatattcctccatccctttattttgagcctatgtgtctctctgcatgtgagataggtctcctgcatacagcacagtcttgaccctttatccaatttgccagtctgtgtcttttaattggggcatttagcctatttacatataaaattaatattgttatgcgtgaatttgatcctgtcatcatgatgctaactggttatattgcacattagttgatgcagtttcttcatagtgtcattggactttatagttcgatgtgtttttgcagtggctggtactggtttttcctttccatatttagtgcttccttcaggacctcttctaagggaggcctggtggtgacaaaatccctcagcatttgctcgtctgtaaaggattttctttctcctttgcatacgaagcttagtttggctggatatgaaattctgggttgaaaattcttttgcttttttttttttttttttttttgagatggagtctcgctctgttgcccaggctggagtgcagtggcatgatcttggctcactgcaacccctgcctgtcaggttcaagtgattatcctgcctcagcctccagaataggtgggattataggtgcctgccaccatgcctggctgatttttgtatttttagtagagataggatttcaccatgttggccaggttggtcttgaactcccaatctcaggtgatccaccctccttggcctcccaaagtgctgggattacaggcgtgagcccaaaaaccgggcgtggtggcgtgcacctgtaatttcagctactcgtgaagctgaggcaggagaatcgcttgaacccaggagttggaggttatggtgagccaagatcgtgccattgcaccccagcctgagcaataatcaaaactctgtctcaaacaaacaaaaaagaatattgaatattggctcctactctcttctgtcttttagtgtttctacagagtgttctgctgttagtctgatagacttccctttgtaggtaacctggcctttctctctggctgcccttaacattttttccttcatttcaaccttggagaatctgatgattttgtgtcttggggttgctcttctcgaggagtgtcttagtggtgttctttttatttcctgaatttgaacgttggcttgtctttctaggttggggaacttctggataatatccacatcactttcaggtacaccaatcaatcataggtttggtttttttacatactcccatctttcttggaggctttgttcattcctttttgttattttttctctaatgttgtcttcacgacttattctattgagttaatctccagtctcatatcctttctttcgcgtgattgatttggctattgatacttgtgtatgcttcgcagagttctcatgctgtgtttttcagctccatcaggtcatttatgttcctgtctaaactgattattctagttagcaattcctctaaccttttgtcaaggttcttagcttccttgcattgagttagagcatgctcctttagctcagaggagtttgttattacccaccttttgaagcctacttctgtcaattcgtcaatctcattctccgtccagtttttgtttgtttgtttttttgagacagagtctcgctctgtcgcccaggctggattgcagtggtgcagtcttggcttactgcatcctctgccacctgggttcaagcaattctcctgcctcagcctcccaattaactgggattacaggcacctgccaccatacccagctaatttttgtattttagtagagacagggttttaccatcttggtcaggctggtcttgaactcctgacctcaagtgatccacctgcctcagccttggcctcccaaagttctgggattacaggcttaagccactgcacccagcctgctccatccagttttgtgcccttgctggagaggggttgtgatcatttgaaggagaagaggcattctcattttttgaattttcagtgtttttgcactggtttttactcatcttcatggacttatctacctttgatctttgaggctgatgacattggatggggtttttgtgtggtggtcctttatgttgatgttgatgttgttgctttctgtttgttagtttttcttctaacaggcctctcttccgcaggtctgttgcagcttgctagaggtccactccagaccctgttcacctgggaatcacaaatagaggctgtagaatggcaaaaattgcttcctgctccttcctctggaagcttcatcacagaggggcaccagcctgatgccaaccggagctctcctgtatgaggtttctatcgacccctgttgggaagtctctcccagtcaggaggcacaggggtcagggaccaacgtgaggaggcagtctgtcccttagcagagctgacgtgctgtgctgggagaatccctcttgtcagggtcacctgctctcttcagagccagcagtcaggaaggattaaatctatggaagctgtgcccacagcaaccccttcccccaggtgctctgtcccagggagatggggattttgtctgtaagcccctgactggggctgtctcctttccatccgagatgccctgcccagcgaggaggaatctagagaagcagtctggccatattttggcagcccacaaatcctcccagcctccttagcactagaaaactgcctactaaagcctcagtaatgggggatgcccctccccccaccaagctcgatcatcccaactcaacttcagactgctgtgctgtcagtgagaatttcaagccagtggttcttagcttgctgagcttcatgggattgggacctgctgagcgagaccacgtggctccctggcttcagcccctttctaggggagtaaagggttctgtcttgctggggttccagatgccactgtggtacaaaacaaacaaacaacaacaacaaagcaaaactcctgcagctagcttggtgtctgcccaaatagccacccagttttgtgcttgaaacccagggctgtgctggtgtaggcacaccagggaatcccctgatctgcagattgcaaaaatcatggggaaaggatagtaacctggccgggtagcacagttcctcacggcttcccttggctgggggagggaggtcccccagctccttgcacttcgtgggtgaagcgatgccccaccctgcttctgctcgccctccatgggttgtacccactgcctaaccagtcccagttggatgaactgggtacctcagttggaaatgcagaaatcacctgtcttctgcatgggtctcgctgggagctgcagactggaaatgtttatttggccctcttgaccctgtcccccaaatcatcttttatttttatttcatccaaatagctgctatcttttttttgtacatctttgcctaaattataataagaacaacgatctaaatttgcatagcaagtggaccctatatttggaatttaaagagtttctggcaaaatttagattaaattggctaattaataacacttttcaaattgctttcccctgctccaataatgaagtataacttctagaaacagctgaaaaatgaattgttcttcgggttatatgctcttaatgttacattgaaacagagtatgaaggcttgaaaatatccgaagggagaaaatggaatcagcagtgatcctgctgtgacctcactacttagtagttatgcttttagccaattcgtttacttgtctttaaactgcacatttctggcagggcagcactaatcactgatcaaaactacctttttttttttttttttttgaggtgtagtctcgctgtgtcacccaggctggagtgcagtggcatgatctcagctcactgcaacctctgcctcccgggttcaagggatcctcttgcatcagcctcccaagtagctgggattaaaagcgtctgccaccacacccaagtactttttatatttttagtagagacggggtttcaccatgttgaccaggctggtcttgaactcctgatctcaagtgatccacctgcctcagcctcccaaattgctgggattacatgcatgagccaccatgcctggccaaatctacctttaaaaattgtgcaggagggaaaggctttaccaacagtgattagttcaaaaaacttcaactctaggcctggcgcggtagctcatgcctgtaatcccagcactttgggaggcctaggcgggtggatcatgaggtcaggagattgagaccatcctggctaacatgatgaaaccccgtctctacaaaaatgcaaaaaattagccgggcatggtggcgggagcctgtagtcccagctactcgggaggctgaggcaggagaatcacttgaacttaggaggtagaagttgcagtgagccaagatcacacaactgcactccagcctggtgacagagtgagaccccatctcaaacaaacaaacaaacaaattaaaaacaaacaaacaaacaaaaaacttcaactctacctcctggctggaactcatattgtagattgcaaaagcacagaattaacatcataatactattgaattcaaaaagaaatctagaaacttcagggaatccagagaagatagagcagatggtctgaatagtcaccattcacattttgctttgttttggtaactattactatcacttaattacatagggtgaatataagaaaattgcctttttcttattttcagtgctaaccctaaaatggtaaaactcttgcaggttgaaattaacagcttctcagtggcccttcaacagaaggttaaagggtagcgaagttgcctctgtaatttccagggtgaacaaatctgaactcagttcttgcagttcccaaattcacagctatcttgggatatgttgatttgtgggctgcaaaatatgagaaattctacctcagagaattctgtttataaaaacttattcgcatctaataatctgaagagatataaacacagcaatgttgttacaactacctgttaattgttaatccttggaaaaagaattgataattatttctgaagacatgaaaagcttcatataataaacaatagactctcaaatgtaaatcagtttttatttttaatttggagaagttaataataataaattgccagcaataaaaaataaatcattcatcaccgttaccgtgttactaatggctggtccatataggtttgcagtgattttggttcttccattctcaaaagaaataatccagcccagagacgaagagtgggtttgaagcataagtggggggttgttgaaaggaaataaagtacccttgggaaagaaccaagggtgtgacttgagagatcaagtgccagagaaaggtcatataccagttaaactccaatatttggcctctcagtgtgcatgcttgggtgtcttgcccaatatttgagattttatgaaacagctgctgcccctgagctcaggatgtgttctgtgtttaggaggtttccccctccctggtaccagctgagaccatttgtcaatcctgagctgaccacctgataatcacctgacattcctggggcacattcccagggtctctaccttaccccactcattactatctgactacctgctctaactgggtgatcaagaatattcttttttctttttttctttttttaagatgcagtttcacttttgttgcctaggccagagcgcaatggtgcgatctcagctcatcacaacctccgcctccccagtccaagtgattctcctgcctcagcctcccaagtagtgggattacaggcatgcatcaccacacctggctatatttttgtatttttagtagagaaggggtttctccatgttggtcaggctggtcttgaactcccgactttaggtgatttgccccaggtgattcgactgccttggcctcccaaagtgctgggatacaggcataagccactgcacctaccctagatattctactggccttggagctttcggtgtctaaaacttttaccaatcaatatatgcagtccatcaactttcttaacttttattgttagtatgaacttgattttttttgttgatacactagttaagattttattttatacttaaaaatttatttattagtggtttagacaactcctctttctgacaactccatctaacttctaggtataaggcttcctgaggatatattgtaagtttggctttgaatattccacactgagaaattttgaaagcattctaattaaaagaattaaattcaggctgggcatggtggttcacacctgtaatcctagcaatttggaaggctgaggcgggtggatcacttgaggccaggagtgcaagaccaggctggccaacatgatgaaaccccatctctactaaaaatacaaaaattagccaggcatggtggtgcatgcctgtaatcccagctactcagggggctgaggagaatcacttgaacccaggaagcagaggttgcagtgagccgagatcatgccactggactccagcctgggtgacagagtgagactccatctcaaaaaaaaaaaaaaaaagaatttaattcaatctcagctccctgcagcctctgcctcctgtgttccagcgattatcctgcctcagtctcccaagtagttgggattacaggtgctggcaatcacacctggctaatttttgtatttttagtagagacggagttttaccatgttggccaggcttgtctcaaactcctgacctcaggtgacccgcccacctctgcctccaaagtgctgggattacaggcataagccaccatgccctgccagggagttcttatcttgataaaggattacatgagccctctaaaagatgtttgtttaaacattataggtggtggcagcagtagtgggcaaaggtgtagtgtgcagcacttgattattttactgctgtttctgctgagcctgtggcagcccagccctgtgtgcagctctctccctgccccatgatgccaccacattccacctgctggcatggagacatgcacctgaggtggaccctaggagcccggcctaagatgggctcctactgctgctgcttgggctgctggcctcaggactgcaggaaacttgggggacaccagggcactgagaacagccacactggcataatcaacaccttcttctggaacatccattgtcccctcctgttgtgaggagacaatgtctactgctcagaagctcttgacccagctgactgaaaagttcgtgtttagcgaatatatttctacagacattgtggagagtgtggtcagaaatttacagatttaatgctattcctatcaaactaccaaaacattctgaacagaactaaaaaacactattttaaaatttacatggaacaaacaaacaaacaaaaccccaaatagccaaccaatcctaagcaaaaagaacaaaactagaggcattacattacctgacttcaaactatattacaaggctatagaaacccaaagcagcatggtactggtacaaaagcagacttacagaccaatgtgatagagagagctcagaaatgccacccatttacaaccatctgatttttgacaaagctgatgagaggaatgtgtgaagaattctctagttaataaatggtgctgggataactagctagcactatgtagaagactgaaaacggaccgcttccttacaccacatacaaaaatcaactcaagataaagacttaaatgtaaaatttaaaattataaaaaaaaaataggccaggtgtggggctaacacatgtaatcccagcactttggaaggtcaaggcaggcggatcacctgaggtcaggagttcgcaaccagcctggccaacatggcgaaactgtgtctatactaaaaatataaaaattagccgggagtggtggtaggcacctgtaatcccagctactcaggaggctgaggctgaagaattgcttgaaccagggaggcagaggttgcagtgtgctgagattgcgccattgcactccagcctgggtgacagagtgagactccatctcaaaaaaaaaaaaaaaaaaattccctggaaggtaacctaaataataccattccagacatagaaactggcagatattttatgaagaagataccaaaagcaattgcaaccaaagcaaaaattgacagatggaaccttattaaactaaagagctttttcacagcaaaagaaactatcaacagagtaaacaggcatcctacagaataaaagaaaatatttgcaatctatgcttctgacaaagatctaatatccagaatccatgaacttaaaaaaacttattaaaaagtaggcaaaggacacaaacagatctttttttttttttttgagatggagtcttgctccgtctcccaggctggagtgcatggtgctatctcagctcactgcaacctccgcctcccgggtgccggttcaagcaattctcctgcctcagcttttggagtagttgggattacagccatgcaccaccatgcccagctaatttttgtatttttagtagagacagggtttcaccatgttggccaggctggtcttgaactcttgacgtcgtgatccacctgcctcggcctcccaaagtgctgggattacaggcgtgagccaccacgtccggcctgaacagatgctttttaaaaaaagacatgtgtgtggctaaaagcatatgaaaaaatgctcatcaccaatcagtagagatatgcaaagaaaaaccacagcaaaatactttctcacaccagtcagaatggctattactcaaaagttaaaaaatgacagatgctggcaaggttgtggagaaaagggaatgcttacacactgctggtgggagtgtaaattagttcaaccatcgtgaaaaccagtgtggtgattcctcacagaattaaagacagaattaccatttgacccagcaacctcataattgggtatatgcccaaagaaatataagttattctgtcatagacatgcatgttcactgtggcactattcacaatagcaaagacatggaatcaacatgctcatcaaaaatggcagactggataaagaaaatatggtatggctgggcaaagtggctcatgcttataattccagaatgtgggaggtcaaaacagatggattgcctaagttcgagtttgagaccaaccaaggcaacatttgttggtctacaaaaaatacagaaagaaaaattagccagtcgtggtggtgtgcacctgtagccccagctacttggagagctgaggtaggaggattgcttgaatgcaagatgttgaggcttcagtgagccaagattgtgcccatcacaggacagtgggcgcccagactccagcctgggtctccccccaaaataaaataaaatatttaaaagaaaatatggtacataaacatcatggaatactgtgtggccataaaaaaagaacaagattatgtcctttgcagcaacatgaacagagctgaagcccattatccttagaaaactaatacagaaagagaaaaccaaacgcatgttcttatttataagttaagagataataacaagaaaacatgaggccaggtgcggtggctcacgcctgtaatcccagcactttgggaggctgagacaggtggatcacgaggtcaggagatcaagagcaacctggctaacacagtgaaaccccgtctctactaaaaaaaaatacaaaaaaaaaaattagctgggcgtggtggcaggcacctattcgggaggctattcaggaggctgaggcaggagaatggcgtgaacccggggggtggagcttgcagtgagccgagatcatcatgccactgcactccagcctgggagacagagtgagactctgtctcaaaaaaaaaaaaaaaagaaaaagaaaaaaaaagaaaaggaaacatggacacaggctgggcacggtggctcacacctgtaatcccagcactttgggaggccaaagtgggcagatcaccagaggtcaggagttcaagaccagcctggccaagatggcaaaacctcatctctactacaaatacaaaaattagccgtgcatggtggtgcatgcctgtaatcccagctacttgagaggctgaggcagaataatcacttgaacccaggaggccaaggttgcagtgagtcgagatggcaccactgcactccagcctgggtgacagagcaagaatctgtcttaaaaaaaaaaaaaagaaaaagaaaaggaaaccatggacacaaagagaggaacagacactgaggcccactttggagtagagagtggaaggataaagatcagaaaaaatacctgttgggtactatgcttagtacttcagtgataaaataatctataccaaatttccatgacagttttatctatataataaacttgcacatgtacccctgaaccaaaaataaacattaaaaagtaaaaactccattagtgggggagagtctaatgtaggcagaagaactggtttgtgctatttctgggtccatgtagactgatgaggttatgaacaggtggcccagaaccctaggtggagaaaacaggtttctgctgcagattcagtgtctgggtgtggggatatgccagacttatagacacttttgtgggtttttggcaagaaacactagaatgaaaaatgccatggtgaagttcctgatggtggtgtctagtccggggaggggtgtggacatgtcaatgtctagtgggtatgtttatgagtgggtgggaatactgtggtggcagctgtgggaaaagggggactgtcatcagagctccttaagttttcatcctctctcactctgggaggagacctagaatcacaggacaatgggcagcgtgacagcctgtgtacaggagagcagagcctcccattcccagacaccgagcgattagtccaagccaggattccatatcttttctctgtcaccaaatgtgtagagttagctgtacaccaagcaattctgcaacaccaactaattgtccaacatttgaattctgaccctacccagagtcagcacagaacctgattccaggcttagtctcaatacattgacctcacagcagatgccaatcacaaaccccttgggcccatctgtgcttgtaagctactgtttaaaaattcagaactcccataagctccctgaagttcaataatttgatagagctactcacagaactcagcatgtttaccagtttattgtaaaagccacaacccaggaaaagtcaaatggaaaaaacatataggaccaaaaaaagagctgggaaaaaatgaagcttatacataatcctagaaaatagctgtgattaataaaattatccatccatcgtgtgctccaggaacagcttatggaaagaaacacccttcccattatgacttagatggtgctgtcttttcttacctatcacatagccagacacagactctgcacattttcttcttgttctcaaaaaaaaggtgccggacacagtggctcacacctgtaatcccagcactttgggaggccaaggcgggtggattacctcaggttgggagtttgagatgagcctggccaacatggagaatccccatctctactaaaaatacaaaattagccaggcgtggtggcgcatgcctgtaatcccagctagtcgggaggctgaggcaggagaattgcttgaacctgggatggggaggttgcagtgagccaagatcacacgatagcatttccagcctgggcaacaggagcaaaactccatcttaaaaaaaaaaaaaagaggaggtgaatttgtcctcagtggtcaaaataaaacacttataaagcaaacttcagttaagtttatctccttcccacagattcctgaactttgagctaccttcactttgagtcaacataaaacttcattttatatccctcctaagaacatgctgacttcagggaaaaacattctctgatctaaaatctgatttttttaccctccacttgccattgccctcccaacttctttctaatcttgtttgctcctccctatgaaagaaagcccttgtctgcctaaactttgcaatccttaaagatcttatagttggtacttcctcctgttgcaatgctcctttgtacactgaattttcttacataaatccaactttatttttaaaagtcaagaaactgcctcaaaacagtaacaagttcatctttggtaatattctcccagtctccttttatcttaaccttactagcatctgcctgtgggtccccagctttccagggctctgtagcttccctcaggattaaggcttcttttatagctgggctgagcaggctgggacttctgcaggggaggctccccagaaagaactaactgggcccttaataacctccttttgcaggctcaacattagttttttcttggagtcactgggctcaggctttaatttccatgtcagagttatacacttgatttttgaaactaagtgtttgaaaaattcagcaaaattactcaaacacagtgttcatacatggaaaataaattataaggtgcttacttttttttttttttttttttgagacagagtctcactttgtcacccaggctgtagtgcaatggcacagtcttggctcaatgcaaactctgcctcctgggttcaagtgattgtcctgcctcctcagcctcctgagtagctgggactacaggtgcatgccaccacacttggctaactttgtattttacgtagagacgggtttcactatgttggccaggctggtctcgaactcctgacctcgtgatctgcccgccttgacctctcaaagtgctgggattacaggcatgagccatcgcacctggcctacattttatacctcaataagaacagcaaaagtatctatttctttcagataataaatttattattgtattatttctattaaaaataatgtagtaaacaattagtcatagggaaaaacttctaggaggtaccaagtttcatctcatgaaatttagtatgaaactcagaaatcaagataacaggatacagaacagagatattcactctcagaaatttaccctgcagaaagaggaactaatgttttataaatttatgtaactcaccaattatctacaatatttcctcgtggaaatgtattcattttctacagccaaaatcgaaggagattttccctattattttccttggtagcattctaaaagctgagccttggaattctgtttgaaatcacctacagaaaacacacctgagaaaattcctaaactctctctgggaaagaaaaaggtaagtaagaatttttaacatacgaaatatatgattagatattaatattttttgaaacccaccacttttatgccctttgtaaatgtttttgaacctttcaagctctactaataaaatgcaatttacagtttaagaaattgaaatcaatataagtgaacaaatcttttcaaggtgacgaacccagggtgtagcagtgatgattaaaaaacagatgtgtctgacttatgtgtcaagtcaggtcatccaatcacgtgagagattctcccaccccagcctgctcacttaactgctcaatgactaacctctcaggagacactgcactatgttccagtgagtggcccaggttttactttcggaaatttttgcagcatctctctggggtcaggttttcttttgttttttttttaggggggatactattttttctttcacaaatcttagagaattcaggggacagaaattatttctgttttccccttaataccagcctctgattggctgaccagcaatgtgtcaccaagatatgaaagctgggttgggtgaaaacaatgttaatgtctcaaggggttacttttttaaaggaagagcacaccaggagatttctctcagccccagtgcatccatctgcttccttgagaggctacactccatacctcaggctgtcctatgaaagaaaatgacccaggacctgagattccctagacactctagcagacatagccatggctgatataatggtttattcacagacagtactgaaaccgatgaccaagaaaaaactaaagggtggttgaggacacatcacccaataaagcttccccccgccaaaaaaaaacctttaccccaaagcattctggtaagatctctgcctagggaaggtaaaaggaaaagaggcacagagattttacacaacacagtgtcaggggttattctttgctttcttctcatgggaaatatttacaaacagaaaatgaatcttttaaaatgtgccatccagtggtttgtaaaaaaaaatacagtattgaaaatatacactaaaggacaaatagatgacaatgtgaactagggaaacgaggctggcatttgggattgtcagaaggaactggaaatttagtattttacttcaagcctgagttaggctggaggaatgggggatgagggctagacttgagaccgcacttgggacacatttaaaaaattcaggggaaaaaaaaaatcagtctcttgtgaagtgtgtatcctcaaacatatattttttttttttgtaaatttttgtaaattgcattggggaaaacaaaatttaagcttaaccaactaactataaatggccaattaagctctgattacataaccagaaaatttacacactcaaagtggaaattaagaaagtacgtgactccctgtagtcccagctgctcgggaggttgaggcaggagaatcgcttgacaccgagaggttgcagtgagctgagatcgcgccactgcacttcagcctgggtgacagagcaaaactgtctcaaaaaaaaaaacaaaaaaaagtaggtaactgtacctaaccgattattgaatttgtttttttttttttaatcatggaccttataaaagtctttccttcaagttcctcccatgaaccacaaactaaaacccatagctgggtactctacaatttttgagccactctttgattaaattctttaatctttttgcggtgactccataaatttttaatagatgaaaagagggactaggaaccccaccgaccaaaactcttcccattcatgaaccctcacccgagtcgggattctcccctgactaccctcccatggtccctgcacaattggccagagacaaggcgctgcggctgcagagctgcccagagaggcctccaggccaggggaccatcactgggtcactgtgcagacaggacgcccagtgtggggaaaagcaagagagatcagattgttactgtgtctgtgtagaaagtagacagacataggagactccattttgttttgtactaagacaaattcttctgccttgagatgctgttaatctataatcttacccccaaccctgtgctctctggaacatgtgctgtgtcaaactcagggttaaatggattaagggttgtgcaagatgtgctttgttaaacagatgcttgaaggcagcacgctccttaagagtcatcaccactccctaatctcaagtactcagggacacaaaaactgcggaaggccgcagggacctctgcctaggaaagccaggtattgtccaaggtttctccccatgtgatagtctgaaatatggcctcgtgggaagggaaagacctgaccgccccccagcccgacacccatgaagggtctgtgctgaggaggattagtataagaggaaggcatgcctcttgcagttgagacaagaggaaggcatctgtctcctccctgtccctgggcaatggaatgtctcggtataaaacctgattgtacgttccatcgactgagataggaaaaaaccaccttagggctggaggtgggacatgtgggcagcaatactgctttgtaaagcattgagatgtttatgtgtatgcacatctaaaagcacagcacttgattctttaccttgtctatgatgcaaagacctttgttcatgtgtttgtctgctgaccctctccccactattgtcttgtgaccctgacacatccccctcttggagaaacacccatgaatgatcaataactactaagggaactcagaggctggtggaatcctccatatgctgaacgctggttccctgggtccccttatttctttctctatactttgtctctgtgtctttctcttttccaagtctctccttccacctaacgagaaacacccacaggtgtggaggggcaacccacaccttcagcccagggtcctgctgtcagcgcagccaccatgctatggctgaagaggactgaggctgagttggccaaggagaactcggggcgcagactgtggagctgactgacgggagacccgagtcccaccacagccacttgccaccagttccaatcaactccttcccttttctcaggatgtcggacccggcactctcaccatttctaggcttccagggggtcctggcatcttagctgtggatctcccaatacctgcaggtcacaaagtcacggagactgggcctctgaagactagacgtagaactccagctgcagccggagacaaaggcccccatattccggaagctgtcttgcccgctccagctgcgtggctgattggagggtttccagcccagtgttgctgattggataacgcttaaatccccgcctcctcacatcgtgattgacagaagatgtgaccaaacgctaggctgaatgaagaaagagtgactgcctaagctgccgcccgctcagaaagggcttcgtccctgagctgagccaggcccaccctagagggtgtttgcatgtaatcttgtgtataaggttatatgcatttataaatattatactgtatggctattcacaaatgaaaagaatataataataatgattttgaaatttcaggttttataaccttcctggctttgagaaggcagcatgagattttttgtctttgtttttgttttttgagacggagtcgctctgttgaccaggctggagtgcagtgacgcgatctcggctgactgaaagctccgcctcccgagttcacgccattctcctgcttcagtcccctaagtagctgggactacaggcgcctgccaccatgcctggctaattttttgtatttttcgtagagacacgtttcaccgtgttagccaggatggctcgatctcctgacctcgtgatacgcccacctcggcctcccaaagtgttgagattacaagcgtgagacactgcatccgtctgttgtaacaatttaattaaagcaatatatccaaaatattattttaatatgtgagcaatgtataattatgaatgagatatatatttatatataacataattatgtatctatatattgcattatgctatgtatttttatccatattatatatagatatttttatctatatgttgtatatttttatatttatggaactaaatctttgaaactaactctgcattttacctttcttgcaaattgcagctcagaccagccacattccaggctcccaggagtcacacatggtcaatacctgtcacattgaagtgcagctctgttgtcaggtctgtgaaaggcctgaatatcccttttcttcctgttaggaataacgctcaaaatcataaggaaattgaacactcgaacaaaggattcctagcaaagcaattttagttctgcacagaggggtgcgttcttgtccagtcaccatgagagcacacctgaacaaaggggcacaagagcctttattcctgacacaagtcctgcccctgtaccctttccccattggccagggtcgggtcgtacaatctgaactaatcctggttggctaaacatttgatttttttagataaggtgggcatgcaaaagaatgcagagaggaaggggaaggggtgtctgcattgagctagaaagttagtcctctttccaaataagggaagaaatgtgagctggtactgataatgcctggtactgtggcgtgcctgggcatctaacaaaggcagaaaggaaaaaggagaaaaaggaaaaaaaggggtgtgtgtgtgggtactatgaattaaagaataaaagattgatcaggctatttgaagagaaacctcatcgtatcccacatgcccgacatgagggaacagcctctttctactaacatctgtcttcagtttcaagggtggaacagatagtggtcatagaaagagcagaaggtaacaagaataaaataaccacaggtagaccactgaagaatgatggggccacaggagaacaaaactctatgtcttcagacctgtccacagtattgacctccaatttttagatatgaagaaaatagattaaaggcaaactttggctatttggccttggccataatggtcaggctctggtcatcggttttttcctgtggtgtgggggactgtgtgcatataagcaccaatcacatgcatacatgtctacaagtattcctgcatcagtcaacattgccttacaagacatttaactttaaatcgggaaaaatgtcagtacctttagggtgcccattgttagaaggtgactaataatcaaactgtctttaaatcttgacacccaatctgcactgggtgcatgtattagttaggtatggcagcataacaaatcatccaaaacttattagctcataattgagatggtccgccatttaggctaggctcagtggggccattcttctgttcccagctgagctccttcagacatgtattgtcagctgtttgttgactaggcagctgtgcttctgggagtgagcttgtgcttcaagatctgtcaacaggggcaccttgctactcctcctcgtggtattttatcctctaggtggctaacatggactttattgatggagacagcagcattctgaaagaaaagcagaagcattcaacaccatttgagcccaggccccaaactagcccactgtcatgttcacaagtatctagtgccttgaacaaataaggccagccagatctagggttgggaaaacagattctgtatctcaatgggaacagctgtaagagcacctgccaataggcatggataggagggatgaaaaattgctaccatttttgcaatcaatatcattatgccttttttgcatatgtggtttatacaactctttcgcatcaagaaacttgtccaaagactcacagctactaaatggctggcctgagactcagtaccaactcttctgactctaaagcccatgcatcaaactcttggctgctgtagatccttgaaatcctggagagagatgctgctacagtaaaagccagatttttaaaaaatgtatgcccatatagcactatttatgattgggaataatcctttcaagaaattgcagaagcacagggtgcctcacacctgtaatcctagcattttgggaggctgagatgaaagaatcacttgagttcaggagtttacgtgcaacctgggcaacatagtaagatcctgtgtccgtgaaaaaaaatttaaaaattggccagtcatgatgttgcatgtctgtcgtctcagctcttcgggtggctgaggcaggaggattggttgagcctgaagtgttaaggttgctgtgagacatgattggttgcaccactacactccacccagagtgatacagagagacactgtctcaaaaaaattgcagaagcatttgaatggacatataataattttgaaaaatagctgaggaatgagtttagaaaaatcaaagcccaagaacacattatttattttcatcatagaaaaaagaaaaagaaactttagagaaattaaatttatcagagtttaattgagaaaagaatgatttgcaaattgggtagcctgtgtaggctcagagagtctccagcatagccacatggtggtaaaaaatttatgaacagaaaaggcaaattgacatgcggaaaatggaagccaggtaccgaaacagtcagattgattacagcttgggagttgccttatggtttgaacagttgacgtcattttactggccaaaacacattgattggtacaagaatgggtacagtctatttacatatccaggtaggtttcagtttagtattttaaataaaaacgaccaaaattaaacgtgaaagggggcagctttatggtgtaattaatttaataatttgtccttttggtcatcttaattttgagagatagaccaaaactttagacattggccgggcgtgatggctcatggctgttatcctagcattttggaaggccgaggtgggtggatcacttgaggtcaggagtttgagaccagcttgaccaacatggtgaaaccccgtctctattaaaaatacaaaccaattagccaggcctgttggtgagtgcctgtaatcccagctactcaggagactgaggcaggagaatttcttgaacccgggaggaagaggttgcagtgggctgagatcgcgacactgcactccagcatgggcaacagagcgagactccatctaaaaaaaaaaaaaaaacttggatattgatattactctctcactataaaagaagtacttatttagtctgaaatcccactgtgaaatagcataactgtggattttttaaagtagaaacaaggacttcaggttattattattttattattattatttatttttaaaagagtagagggaaactccttgtgttgaaatgtgctgtttaccaaaacaaacagacaaacaaacctcatctgttttaggatgtacctattttcttttttctttctttttgtttttgagattgagtttcactattgttgcccaggctggagtgcaatggcgccatctcagctcactgcaacctccacctcccgagttcaagcaatcctcctgtctcagcctcccaagtagctgggattacaggcatgtgccaccacgcccgcctaattttgtatttttagtagagatggggtttcactatgttggtcaggttggtcttgaactccaggcgtcaggtgatccacccacctcagcctcccaaagtgctgggattacaggcatgagccactgtgcccagccctacctattttctgaaattttcaatttgattatgtcacatttagcatgagtgacttactttttttgttttgtttttctgtttgaacctagtgcagaagttaagaatgatggcctccgataaatttgtttaaaaaattctcccattttggcaaagttctcacatagatcagagtgtaaaaaactcacgatcttagtgccactgtcaatttccattatttttgggttttgtccatattatgtcattcataggttatggtgtctccatagtcacatatgtctcaattgttgtcattctagttaaagagagaccatttgtcattctagagatgactcatgcatgataacatttaaaacttttgagctgaggtggaaggattacttgagcccgggggtggaggttgcagtgagctgagatcacacccctgcattctagcctggctgacagagtgagaccctgtctctaaaatgcaatgcaacgcaacgcaacgcaacgcaacgcaacgcaatgcaatgcataaaatagcctcaaccatgttccaacaattactttcttttttcttctccaacaataaccataaccttttttttttttttttgagacagagtcttgctctgtcacccaggctggagtgcagtggcgcaatgtcgactcactgcaacctccacctcccaggtttaagaaattctctgcctcaccctcccaaatagctgggattacaggcacgtgccacctcgcccatctaatttttttgtatttttagtagagatgaggtttcatcatctgggccaggctggtcttgtactcctgaccttgtgatcctcttgcctcagcctcccaaagtggtaggattacaggcgtgagccattgcacctagacaataaccataatcttaagagttaacattgtagatcaattttgtgtttttattcaagtgttttgttacaaaaaattaaacatatgcaaaacaacaacaacaaaaataatttaatagacctatcatgaagcttcaacaactactaatcttgtgccattctggtttcacctattcttctctacttcggtcatccctggccaacccattgtccacccttcattattttcttcagttttgttttttgtgacgtcatatgtacatacattggaaggcacaaatcctaactgaagatttttgacaaataaatacacccatatgaccttcatatcttttaagaataaatagaatgtttcccttctctattaatagaatttataataaaatgatagaatattcttattattctcagataattccctcctgcttttttcagacaattttaatctctaccgaggctacttggtattttttttttttaccattagttcatttttccagacattatacaatttgtattattttatttcaagcttgtctcagcaggtttatgagattcatccaaggtgtgtgcttcagtttgtttctttctatggctgagtagccttctcttgtatgaatgagctatgatttgtttattcatcttcctagacatggacatttgggttgttttctgctttaagctattatgactaaaaggtctataaacattctggtacaaatactttttcatatataatttaatttctttactagcatttaaatgacaactctttacattttttagtggtttctttagggataaccatatgcatctttaacatatcacaatctacctagagttaatactgtacaattgtaataaatgtaaaatatgaagaccttgctatggatgagctttacttacctccttttatttttatgctattcataaattttacatctacacattctatatctcacaatacttacaatttctcctttagtcataagtcttataaagaaattaagagaaaatggtattataaatatttggaggcagatattttgggctatgtaaatacactgtttctcctttaaattttacccacaatttgtgcattctttaatacatctttatctacagtaattattactgtggtgtcctggtagtgatttcctattttgcattatctatctacattgattagtacttagaattctgttaagaagatttgctttggccgggcgcggtggctcacgcctgtaatcccagcactttgggaggccgaggcgggtggatcatgaggtcaggagatcgagaccaccctggctaacaaggtgaaaccccgtctctactaaaaatacaaaaaattagccgggcgcggtggcgggcgcctgtagtcccagctactcgggaggctgaggcaggagaatggcgtgaacccgggaagcggagcttgcagtgagccgagattgcgccactgcagtccgcagtccgacctgggcgacagagcgagactccgtctcaaaaaaaaaaaaaaaaaaaaaaaaaagatttgctttttctctttcttctttccttttttcttattatattttgtctatatctgcatggactcatgtatagctcttttattctctaggttataatccaagggtattattattttgtttctcacattgtttcagcttgggctgctggaaactctttcaggttcacttcctctgacatgtctctttctgttgttcataaagcactttttaactttctagctttacaaaatactctaccttaagtttgatttttcactccagtcccagaattatctatttgtccaagtagtgttgcttccttctattgaagaatagtacttaggaaccataatatgagagctaggtattcttattaatactggggtgttactgcttctgaaagctctcagcagacagagtttggaaatgtacatattaatatacactcacatataaaaacatctcttcctttctctttctctgtgtctccctctctctgaatgaataaattatgagacctgcatttatccaaatattcctggctagggatggtggctcatgcctgtaaacccaggatgtttagctcagaatgattcatcctgaccctcacagcagaccagtcaggtggaaaagggtacagggaattatggtccttattacttgttttttgttttgttttgttttgttttgtttttgagacagagtctcactctgttactcaggctggagtgcaatggcgcaatctcatctcaccacaacctccgctgcccaggtgcaagcgattctcctgcctcagcctcctgagtagctgggactataggagcacaccaccacgtctggctaatttttatatttttagtacagatggggttttgccgtgttggccaggctggtctcaaattcctgacttcaggtgatccacccatctcggcctcccaaactgctaggattacaggcatgatccaccatacccggccagtctttattacttttattgtctgattgtttattgctagtttagtttaaaaagttgacttttgtttattgaagctgtatgtaatgaacttggtaaattcacttgcaaattcttacagatttgctacacaagataatcattatgtgcaaatgaccgttttattttttcctattaaattttttttttccttaccttattgcactggctaggatctccaatgaaatataatagaatcaataatagcaggcatccttgtctttttcctgatctaggaggggaaacttttagtagtttaccattgagaatcataataactggccaggcacagtggctcatggctgtaatcccagcaatttgggagtccgaggtggatggatcacttgaggccaggagtttgagaccagcgtggccaacatggtgaaaccccatctccactaaaaatacaaaaattagtaatgcacgcctgtaatcccaactactttggagtctgaagcaggagaatcacttaaacctgggaggtggaggttgctgtgagccggggtcacgctgctgcactccagcctgggcaacagagcaagactctgccaaaaaaaaaaaaaaaaaaaaaaaaaaaaagaattctgatgcttactatagattgttgaaaagtaggtaccttttattaaattaggtaagttttctttcattctagattgctgctttttagaaaattatgaattggtgttcaattttttctttttttgagatggagtcctgttctgtcgcccaggctggagttcagtggtgcaatctcggcttactgcagcctctgcctcccgggttgttctcctgcctcagcctcccaagtagctgggattacaggtgctgccaccacgcccagctaattttttttttgtatttttagtagggatggagtttcaccatgttggctaggctggtcttgaactcctgaccttgtgatctggctgcctcagcctcccaaagtgctaggattacaggtgtaagccaccgcgccaggccagtgttcaattttttttttttttttttttttagatggagtttcgctcttgttacccaggctggagtgcaatggcatgatatcagctcaccgcaacctccgcctcccaagtttaagggattctcctgcctcagcctcccatggtgttcaatttttaaaaatgcttttcctacatctgttaagataatcttgtagatttttctacttattctgttaatgaaataatttcatgagcggttctcaaccgagggtaatttttctccctagagagcatttggcaatgtctggagacatttgtgattggctcaattgggtgtgtgtctgtgctactggcatctagtgggtagaagccaggggtggtgacaaacattctacaatgcacagaatgtctccccacaacaaagaatattcaactaaaattgttaatagtattgaggtgtggaaatcctaattcacattgcttaatctttgagtgttaaacggaacttcatgagagagacgggcctataatttttctttcatgtaatgtccttgtagttttgtcattaaggattcttttggtctcataaaatgaattagaacatgttctctctttttcaattttctggaagaatttgtgtaagatagatgcactctttgccttcctttacaatcagacctgcctctggtcaccttttcaactccagaagtcatttatgtcctttgaccctaagatatttgctgaaccaaacgggattagtatttcttaaagatcagaactcacctgagcctactggattctagcaggaatggagacaggtagaaagactcactttagcctcaggcttaaatatgtttttatttatttatttatttattttaatttttgagacagagtctcgctctgtcgcccaggctggagtgcagtgccgtgatctcggctcactgaaacacccacctccccggttcaagcctcagcctcccgagtggctgggactacaggcatgtgccaccatgcccagctaattttttgtatttttagtagagatggggtttcactctgttagccaggatggtctcgatctcctgaccttgtgatctgactgtctcagccttccaaagcactgggattacaagcatgagccaccgcatccagcagtatgtttttattttttattttcttgagaaagagtcccactctgtcacccaggctggagtgcagtggtgtaattttggctcactgtaacctccacctcttggattcaagtgattctcctgcctcagcctcccaagtagctaagattacaggtgtgtgccagcacactccactaatttttatatttttagtagagatggtgctttgccattttggccaggctggtcttgaacttctgacctcaggtgatccacccacctcggcctcccaaagtgctgggattacaggcatgagccaccgcgctcgaccaggcctaagttttatactctacctcagacttttatcattttggcagttattggacactaagtcaaatactaacaaagtgagccagtgattcgcatttagctattgttccttgtctatagcaccttgggtaggaaccctatgggaagatcaaggcaggataaagccttccttgggatgctggccataacactatcacagcagcgatgaaatcttaccttctaccactcccatccactgtgtcttctgttgttaactaaacattcagctcctttcttggggtggaatgccttttagtttattctacaccttgactgtcacagggggtcagtaataggggagaacacaagtttctggttagataaatctgggtcgaattctacttttgccactattagtagagttacccctaacaaaacatttagcttttccagtgaagcctctgtttactcatctgtggagtgggacttataatgtctacttgtgtgggttaagaagacaagaattcattaacctatttcccacttgccctgagaacactcatgtttctaatcctaatgtgacatcatatacatttctgttacattaggactagagacaagttttgtttagaaataacttcacaaacagtttttatattttattttcaagataaaaatcattcagatttgcttcagcttcaaggaggatgtttatgtaaaattaaatgagcactggcaaccagctgcaccttttcttctaaacgggaaatgggttaagtggtttagatggctctcagcctcaaagggctgaagacagaaactctaggctcaatttccagaaatggctctcaacaccacatagagctggtccatcagaggagctcctgcttcatccaaaggcaggaagcactaaatcagaagattgccttagagttaggaagtcaatgctggactcaagcccacaaaatgtcctcgtcctgcctatctctttgctcgattcaaaatcccattcatgtggagctaattggagaaatcaaaatcacatttttttttttttgagataaaacagacaaaaatttctgctcttgagaaatgtatattttaagatgagacttgttaaaagagacctctgtcttattttgtatgtatgtagagccatggaagtctagagctttgatgtatgatgaatatgtgtttcaatcttctctgttctataatcttgggcagctattttaacttctttgagcctcagctttctcaatcctaaagtgaagatacaaattcctatcttatcctcaatcagttaaatgtagaattaactatatgatcctgcaagttcatccttaggttacatacccagggaaaatgaaagcatacatccacacaaaaacttgtatgtgagtgttcatagctgcagtattcataatggccaaaagtagaaacaagtcaaatgtctgtcaattaatgaataattaagcaaaatgtggtatatccatacaatggaatattattcagcaataaaaaggaatgaagtaccaacacatgttaagacatggatgtacctttcacgtagcatattatgtgaaagccagacacaaaaggtcacattttctatgttttcatttatataaaatgtttagaatgtgcaaatccacactcagaagttagattagtgattgcctaggactggaagccagggagtaattagggtgtcatggttaaggggcgtagaatttcttctgagggtaataaaactgttctaagatagattcgattttagtagtgatagatgaacaactctgtgaatttactgaaagccattaaattgtacactttaaatgagtgatttttctagtatgcaaattatatttcaaaaaagttgtaagaagaaaaagttctaccatgtagggttctttgaagattaaataagctaggaatacaatatacctagtgtacctagtatacatagtgcctggcatttggtaggtgttcaaaatatgctaacatttattctgttggtaatccttaacaggctggtttatacaaaagcttacaattatgttcattgttaacataatactgatgtatcctttcgtaatcaatgtgtgccttgagcagatagcccttctttaccctcagttccagccctttctttgcttcttgaaattttacgtgtatcacaacccagctcagatgtcaccttttcaaagcctccttgttggttcagctaaaaatcctgggctttctgtatagcatccccaacaaggggcattcagaggcaagctctggtcaccatctggcttgtttccaaattatttgtgaatgcaccacctgtccctgtgtcctgccctctgtttctggcatggtggcacctggcacagagggagtgatcctgtaaggaatgtgttcacagcacatgtgctctgagtcccttggcacagcacctatggtgggcagaattctgagatgattctcctgacctctgccccctggtgttaatgctataattatgtgacatggcaagagaaattttgtggatgtcattaaagttagtaatcagcagaccttatgctagggagatgggtgggcctaacctaatcacagaagccctttgaaagcagagtcttctttggctagaaaaggccatcagaggttcatagtgggagacagatttgacttgaggctggttttcagttactgagttggaggggtccctgagacagaactgagaacagtctctaggagcagagagcagcaccttggctggcagctataaagaaggacctgggtccgggcgcagtggcccatgcctgtaatcccagcacttgggaggccaaggcaggtggatcacctgaggtcaggagtttgagactagcctggccaacatggtgaaaccccgtctctactaaaaatacaaaaattagccaggcatggtggcaggtgcctgtaatcccagctactcgggagactgaggtagaaaaatcgcttgaacctggaggtggaggttgcagtgagctgagattgggccactgcactccaacctgggcaagagagcaagactccatcgcaaaaaaaacaaaaaaaagaaagacctggttactacaattgcaaggacctgaattctgccaatgacctgaatgagcttggaagtggattctccccaagagccttcagagaagggcccagcccagccaacaccttgactttggccttgtgggaccctaagcagggagcccggttaaacccacctggacttctgacttatagaactatgaggaagtcaatagggattattataaactgctacatttgtcatagtttgttgtgctacagtagaatacaaatatatccctcatctctggagagcagttttattcctattttacaagtgaggagacccagaggggtgaagtcacttgcccaagattgcactgcacatgaatgacagggctgagctacagcctagggcaggagtcaacaaatattttcttttctttttttttttttttgagatgaagtctcgctcttgtcccccaggctgcaatgcaatggtgcaatctcggctcactgcaacctccacctcccaggttcaatagattctcctgcctgagcctcccgagtagctgggattacaggtgaccgccaccatgcctggctaatttttgtatttttagtagagactgggtttcaccatgttggccaggctggtctcgaactcctgacctcaggtgatccgcccgtctcagcctcccaaagtgctgggattacaggtgtgagccaccgcacccggcccaaacattttctataaagttaaatatcttaggctttgtaggcctaaaatatttacaatttggatctttacagaaaatgtttgctgactcttttaggatcttgaatctgagaatcttgtttctattggtgttaaggatgtgctcaggtatctttctataaagatactcctgctacagagcttgctgggccttggctgctcaatgcaggccttgagacatccctgtggaaatgtatcatgttcctaggcagggaacagagcaacccaccatcacatcgcccatgctggccatgacatggtggcctactgtgtgctgtttggagatggtatgggggtggggacaggacatgacatgtgcttacctgccctccagatgctgtacacaggggagccagatatataagcaaataattagcatgcatgggctatggaaaggtgctcacgatggatcacgttcaataaaaaactatatgcaatgcatgcccagagttttgtaaaatacacgttaggaaaaagttatatcaaaaatgtcacagtgatgggtggtctctgcgtggtaatgagtcttaagtcactggaaaagaacattggacccctgtcctggaggagggagaaaggaggttcttccaagaagatcgtggattctcccattgcttctctcctacttacagatttaaaaaaaaatagctaatatcactaagcacttactataagccaagcactgtcgccaagcatattatataataactcatttaaccctcatgccatctctaccagacctatctgattccagtgcttagtacttgtttctccaagtgtggctgcatttaggggaatgtttttccttctttgtagggttcgaaactgttctttatctgttaagggagatattctgatttcttttaactgactgatattttctaatttttctgcagtttccagcgttttttttttttgaaatggagtctcactctgttgcccaggctggagtgcagtgggaccatctcagcttactgcaacctctgcctcgcgggttgaagcaattctcctgcctcagcctcctgagtagctgggactacaggtgcatgccaccaagcccagctaatttttgtatttttagtagagatgaggtttcaccatgttggccaggatggtctcgatttcctgacctcgtgatccacctgcctcgggttcctaaagtgctgggattacaggcctgagccactgtgcccggcctagctatcttttttccactggaaaaaagaaggaaggcttgcaggtttatttttgtcagcatgtcgagggatatgatgtatggacctggaaagtcctgtgaaagcctagaagagagactggttcataccactttaggaaactgaagagaagtcacccacagaaggtgacctgaattttaaaggaagtgcatgagttcaccagatgaaagaacttttgtagccaaggtgtgacattagacccgggacacaataaacagtgaatttaggtgcaggaagtgagactaggaggtggccagggacctcatcacaaggttgtggatgcttaggaactgggattattccgagggcaatgaggagccactgaaaggcacagccagggctgggcgcggtggctcatgcctgtaatcccagcaatttgggaggctgaaatgggcggatctcctgagatcaggagtttgagaccagcctggccaacatggcgaaaacctgtctctactaaaaatacaaaaaaattagccaggcatggtggtggtggcctgtaataccagctactcgggaggctgaggcaagagaactgcttgaaccctggagtcggaggttgcagtgggcccagactgtgccattgcactccactctggtcaacagagtgggtctccatctcgaaaaaaaaaaaaaaggcacagccaggtgagggactggttgggtgctgttttggtagctcaagctggtgcttcatgaagggcaggcagcctggggacagagaggccagtgagaggcaggagcagcagcccaggctgtcactgaggagggaacaatgtggcaaaaatggagaagtgcataggagtctggaaggtccagacagatgtgggaaccccacctcctctccccactccccactcacttattagctgtgaaacccaagcaaggcactgccctctgagcctttatgacttagccacttttcactaaatgtgaaaagtgcctgactggtgaccagtaataagtaggtgaagtggtagctcctttccctgccctgttgaggcggaagctggtgaccaagggttccctctgagtgacccagctggtggcagggaaaatctgaggctgcttgttcagagagggttaccactatgcccgggcagcacggcagacttgctgctgggaccagttctggaggtcagagacctggagggcttggtgtctgacggctgaacaaacaagctggttgaggcgaggttgccgtgagccgagatcgcgccattcaccccagcctgggcaacaagagcgaaactccgtctcaaaaaaaaaaaaaaatgccggttttgtcaaagcagcaggtggcaaacactgagtcaaaagactttcccggccgggcacagtggctcacgcctgtaatcccagcactttgagaggccgaggcgggcggatcacaaggtcaagagattgagaccatcctggccaacatggtgaaaccccgtctctattaaaagtataaaaattagctgggcatggtggcgggcgcctgtagtcccagctacttgggaggctgaggcaggagaatcgcttgaacccgggaggcggaggttgtagtgagccgagatcacgccattacactccagcctgggcgacagagcgagactccgtctcaaaaaaaaaaaaaaaaaaaaaaaaaagactttcccctctttgggcctcagtttccctttctgtaaaatgcaggtgaagaggcatgagctcaggattcctaaagccctacggggctgagcaaggacggtgctttgcgtttgcctcccttcccccagcccgcccgagagggtttgctggggcagggtggcccctgggacgggttccagacagttctaggcgctcaggtccgcagctgtgctacccccgccgcccgggacgcccggtccccgccagggccctctcactgtagctttaaggagggctggggccgggtgcagcggcacctggagtctcggtggaacccggcagcggtgggcgcggaccccggagaggctgccccgagcccgagcaccccctgaccgggcgctcaccacgggtgttgggacaagcagcggagcctgcgggctggagccaggctcggaccctccgcgccggggcgggcggccgagcggacgcagctggcagtggcggcgggagagcgccccggatccgcccggagcccaaccccgtggcacttcggctggctgggcagcggcgctggggacaacgcggggccttctgcaacgagcgcctgcgtgggactccaggggccggcgccccgctccgctccccccaggcctcaaccccgctggctacccgcgctgaaacctcacctgccgccggctgcaaacggactgcgctccaggtgggtggaaacgtccttctcctactttctgggctcactcggctccctgtgacgcgatcccgcttgcacccttgcccttcacgttgaccgcagtggctggtgggcagtgggggacaccctgggctccgcctgggttttctcttgctggtgacttgggccctggcgctcagtgtccctggtcgttagacaagggtgccttgagccacttgttgttcaggcggtttcttctttacagaaagtggccccccacacgcccttcctggtggcaggagcagggcagtgggcagcgtttctgccctgctccatggggctggggttggaggcggctctcccattcctgctgtccggacaggagcggggcctttctatccgcagacttttgctgaagacactgtcccccgcccccgcccctacgccagcggcagagaagagatccaggctggccccgctcctggttggtgggcagggcaagctggaggggggggcaggtactaagtgttgctgtggaaataaaaatcattgtaacaggagaataaatggttttcgtatattttaattctatcaaaaggatattcttctgcccatttgacagaggaaggcaccacgtggagaagcttcataacatgagggccagggcccatcctctgtccatccctgggtaacctgcttcccttacagctcgctgtctcacgctctcatcttcataacctgcatcccctggagcagagattcgagctcagaggtgttgagcagcctctgcaaggtcccagagttcagaggaggaaggaccaccatagtgacagggagtgacaggtggagccatctggtcagggagcaccctcccctggctggagggaggtggggacagccgcagacaggcttcagggaaggggtgaaatgagggccctggatgggagcagagggttccctggaatggggcacaggcctagtagaggcttccaggtgataggagtttggggggagggcatttgagggaggcagggccaccctccgaggccctgcatgagtgctagggttgggggtgggacttctcagggacaggggagttcctggcttgccctggggtgggcttatgcattccagggcaggtaactcttcttttcctagcagggtacaggttctggaggtacacagtgtaagggaccagtaacctgcttcaccaattctctgatatggctcaaggaaattcttggggtgggacaccctgctgacagttactgcaaaaatagtcacggcaaaacaaaacaggctgtccttcatccagtagacactgaccctctccacgtgcccctaatcccccagatggcaggttagcacgtgccctgcctgccatgggggagccacatggaaggagggagacccacatagaaggagatgaccatgatgccacgtgagaccatgcaaaggacaattgcaggggctggtccaaggtgtgggagaggttaagccagtaaggcaggcagtgcattccagagtgagagctgcctatgccaaagacttaacacctgcacccattcacagcatggcctcaactttatgtattaaaagatagtggctgggcgtggtagctcacgcctataattccagcactttcagaggccaggttgggcagatcatgaggtcaagagatcgagaccattctggacaacatggtgtgttgggagcaagccccccaaagtctggccataaactggtccccaaactggccataaacaaaatctctgcagcactataacatgtccataatagccctaacgcccaagctggaaggttgtaggtttacaggaatgagggcaaggaacacctggcccgcccagggtggaaaaccacttaaaggcattcttaagccacaaacaaaagcctgagagatctgtgtcttaagggcatgttcctgctgcagttaactagcccaacctattcaattaatttggcccatcccttcgtttcacataagggatacttttagttaatttaacatctatagaaacaatgctaatgactgatttgctgttaataaatatgtgggtaaatctctgttcagagctctaagctctgaaggctgtgagacccctgatttcccacttcacacctctgtatttctgtgtgtgtctttaattcctctagcgccgctacgttaaggtctcccgaccgagctggtctcggcaatggtgaaacctcgtctctactaaaaatacaaaaaattagctgggtgtggtggcacgtgcctgtagtcccagccacatgggaggctgaggcaggagaatcgcttgaacacgggaggcggaggttacagtgagctgagatcacaccactgcactccagcctggcgacagagcgagactccatcttaaaaaaaaatagtgataagctgggcacggtggtttatgcctgtgatcccagcactttgggaggccgaggtgggtcgatcacttgaagtcaggagtttgagaccagcctgaccaacatggtgaaaccctgtctgtactaataatacaaaattagctggacgtggtggtgcatgtctgtaatcccagctactcgggaggctgaggcaggagaattgcttgaacccgggaggtggaggttgcagtaagccaagatcacgccattgcactccagcctgggtggcaagagcgaaactccgtctcaacaacaaaaacaacaacaaaaatagtgataaacttggctgtgcacacaggcagggatttgattcagactagagctgggtccaaatccagcagcaaccttggacaaggggtcaccctaggagtcccagtgttcttgggacataacactattgtgaggaataagtgaagagatgtctgtaaagtgcttagcatggtgcccggcctctaagtgcccagcacacacctggtgccaccatcgtcctgtgtggtgtggagagaaagggagaaatgcacagggcaagggagaaatggacaagatactttatatggagattatgctcatctgtgagaagcaagatttgtggggatttgtatttttcattctcattttcctgtggctttctctttttcccacaatgagcagcagctattgtatcgatagaaagtaaaatgtgttgtaagttgccttgtgcaggtgtgcccagatgcgagctcctctagtgctgataaccctgctgtacccggctacaggcaagattcttcaccatttggggttcagtctcctcatctgtaacatgggaattttctccagcccagccaccttcccccaaagtgttttttcctcttttttttttttttttttttttttttgagacagagtctccctctgtcaactggactggagtgcagtggcacaatcttggctcactgcaaactccacctcccaggtttcaacaatgctcctgcctcagcctccagagtagctgggattagaggtgcgtgccaccacacccggctaatttttgtatttttggtagagatggggtttcaccatgttggccaggctggtctcgagctcctgacctcaagtgatccactggcctcggcctcccaaagtgctgggattacaggcgtgcgccactgcgcctggccaagtgttttctcctcctaacagcctttcctggctgtcaactttgaggagtggcaggtagtcaggttctttttctctctccatgaaaatgctttgatctggagacaggaagtacttgcccccaggacagattcacaggaggcgaactgcagggaatttacaaatggcattgtatgtgtccagtagtctaagggttcaaagatactggggtccattcccagagcactccttttacatgtatacattctctctctctctctctctctctctcacacacacagacacacacacatgcacacacacacatttgtaaacatatttgaaactatacccctttgaaatctaaagtttcacctcctatatcttaaaaatgtaccatgcctttcacctcccacaggaatatgactttgcaccactgtgtattgtcgtttggctgggcaagccccattttgaagggattgctggttcctgacatcttccttagggtttatgctcctttgcttcctgctgcaccaactcagcctctggaagagcagacagctggtgtatctgcaaatcctcctctcagcctgccagagtgcctgccctttaagtgatagcaggcccaggcagttgagtggttttccccaggacaagctgcagagcgagaaccaaatccaggactgcactccctcaacagtgctgtggcagctggaatcctgcattcttgcccctttctcagctctttgcaatggtgggggaggattttcacccaatgagtatctgctcatccagcagcactttccctcatttcagaagatttactcaatgaacatttattgagcagctattatgtgctaggcactggggggatatagtggtgaacaaagccagaatggatccagccctctgggagctcacagtctgggatagtggacaggtgtagcagaagttaggacaggtgcatgctgtggtgaggacagcccagaggacttgggtgttaaagtgaaaagtgtcagcagagaaggcgtctcagatgaggctgagctggcccttgaagagagataatgggataacctggacctaggtttcagcctcttagcatggtctggggccaggtttttacccaggtttatccccccatccatggttttctttacttaatttagataacactctatatatttcttggtatacttaagttgaaaaaaagtaacatatcgtaactgttttctcctgttattaaacctttttgctgagcttgattttttaaaaactattaatattagttacttcatctagaagttatgtcatattttacttaccatttctttataattggacacttgagcatttttcaaatgataacccttataaacaagggcatggtgaacatctttttgcacaaagttttgctccatgttgttagtttcagtttcagacatttgaatgctctgtttcaatgttctgtttgccctaggtcccagtgtcttctttgtccagtggagttaacagcgtggatctcatgggattgtgaccacgtgaagtaaggcagagcatagccagcaaaccctgattctggcaggcctggtccacccaacaagtattcattctcctccctctcagcttcccataaggcatcagggtgggcaatcattattattattattgtttgagacaaagtcttgctcttgtcccccaggctggtgtgcgatggcgtgatctcagctcactgcaaccttcgcctcctgggttcaagcgattctcctgcctcagtctcctgagtagctgggattacaggcatgtgctagcacgcccggctaatttttgtatttttagtagagatggggtttcaccatgttggccaggctgatctcgaactcctgacctccggtgatcctcccaccttggcctcccaaagcgctgggattacaggtgtgagccaccacacccggccgtgggtggggaatcttaatatgcagcagtagatgaggctcctgaggactggggagaggcctagagtgtcacacttagttcctaccatgtcccaggcgcagtgctgatacccattatctctgaccttcaaaatagtgctgcaaagtccgggacaccatctccattttgcagatgaagaaactgaggcacagaggtgtcaaatgacctctccaaggttgtaaagtgacctagggtagagaaatactaacacctaggtctccagtacctttcatgtgacccatttcgtcttctctctcctgtgtccagatgtgtgatgggggcctctactattgcatgatggtcagcaccatggtggttcttgtggctgggacactgcttgacttggtggagccaaggggatgcacgtgcccagcctggccagctgtcccacccacagaacaccctgtgcctggggaccccagccccggctccagtgggtcagttccttctgttgtggcacaggtggcctgctgctgctcctcagtctgctgtggtctggcagggccagcacccaggggtcacctgatgggacccacgccacctttccagaggcctgcaccacctcacagtggaatcctcagaggagagctgcaagtcactggggcagggtgggccagtggttggggaccacaggtgggggcttagtcacaccattcagcatttgcttagtaaactctcatggggttccttatctgggccagcccttgccctgtactctggggacattctagaagccaaacagtgcagtcctgagggaatttaaagcaccatgacaaagggagacaatgacaaactagaaaagttggagctgttagagataggcagacatgatcttatggtgacacggagaaacccaggaaggctttctagaggaggggggcagctgagctcagcatgcagtttgtattgcgagcattatatgtaaacatccagccacagttggaatgctgactaatttcttaacccagcttatagccagtagaagactctcctatctggacccagacagttgaagagatgttggttctcatacctgggttcagggccataggtatgatcatgggttaataccaacatagggactcagagagaattgtgactctcatgcataccagttaaagcctcaggccagtaagcgtcctaacagggcctagtacacagatgagactgtaacactcatatgcacccccatcccacaataaagattgtcatccacacacatgaacacaactcactgttgaggttctgaatctcacagctggagacagttgaaagtttgaacattgactcttgtaagtggatccggtccaccagtgggttggcgactctcagaccaagattcaacacaccgtgaggcttttactccactgaggagacactgtctacaggaagaattgaggctctcagtatagattgtccaccattgtgtctcatgtacttagacccaaaatacaggtgttgactttcatacctaaaacaaggacatgttcagtattgttaatctcatccctgggccttcctgcaggagtgattttaacatctgcctctgctcaacacttgggtgattttattctccttccttagctcagcccacggatgggattgtgacatatctcttggccaccatccagctgatgtgactcttctctttttgctaggttctgctcaagaagagattctgacatattgttggaccaaacaccaaggttatgtcacttttgtgccttggccctgacctcagaaggcattgcgacatactgttgggttaatcaccaaggtgatgtgggacttctgcctggaccctgcccacactgggcattgtgacatttagggcccatcaactatctggcatggccctcctctcttatctgaccgttgcctataggagagattgtaacacatctctggatttagaatgtagatgatgtgactcttctctcctgactgggccatggccagagaagggagagtgacttaccactggatccagcacacaggttatatgattcttctttgtgatctctgcacaaaggggtcattgtgagatatctcagggtttatcacctagatgatgtgatgctccttttcttcctggaacctgtctacagtgggcattgtgacatatcacttggcccagcacctacatgttgtgactctgatctcatgcctgggccctgcccactggggtgattgtgacatataagctgggcacagccatgaggttatatgacactcctctttttttgagttctactcacagggggcattgtgacatacctctgggctccttacctaggtgatgtgactctttccagggtcctcctgtcagtgggtattgtgcccaagatgtaattgtgatgcatcactggtcctagcacctaactgatgtgactctcctctccttccaaagccctgcatttattgtttattgtgacatattttcaaaacctaggttaggcaactcttttgcatgcgtcctgctaatagggctattatgacatatttttttttcacctaggtgatgtgactctccctttctgcctaaacactgtaaaaaggggagatcgtgacatatcactggacccagcatctaggtgatatggctctcctttttcaccttggcttcttgtattttgggtattatgacatatcactgggtcaaaccaaaggagggggaggctcttgcctaggccctgcccacaggagaccttgagacagatctctgcatccatcactttggaagtgtgactctcctcttctggctgctccatgcccgcacagaagactgtgatatatctccgggttcaccaaccaggtggtgtgtctcccatacctgggcttttcttgcagagataattgtgacaaatcgttgtgcacagcacccaagtcacgtgactctcctctcatatcaaggctctgccaactagggtaattgtgacatacagctgggcctagcccctaggttctatgactcttttgatgattctgagccctatctacagaggtcattgggaaatatctcttggcccatctactaggtaatggaactcacctgcctgggctctttttttaggaggtattgtgacatagggctggatccagacctaggtaatgtgactctcctctactgcttgggctttactcaaggaggaattgtgatgggtcactgaacccagcacctgggttatgtgttatgtgactttcctcttctgcctgggccctgcatcaattgtgttttttttttttttttttttgagatagtctcattctgttgcccaggctggagtgctgtggtgccatctcagctcactgtagcctccactgcccaggttcaagtgattctcctgactcagcctcccgagtagctaggattacaggcgtgagccaccacacccaactaatttttgtatttttagtagaaacggggttttaccatgttggccaggctggtctcaaactcctgacctcgagtgatccacttaccccagcctcccaaagtgctgggattacaggcatgagccactgcacctggccccctgcataaattatacattgtgacttcactgggtactaacacctagttgttctgactcctcagcatgggccccgcctacgggtgtattatgacatatctttttgttcctcacctaggtgacgtgactcttttttgtgtcttgaccctgcctaaaggggtgattgtgacatatcgccgaactcagcacctaagtgatgtgactctcctgttttgcctgggccctgcacatatttggcactgtgacaaatctctggaacaaatacccagggcatgagaggctcctgcctgggacctgcccaaaaggggccttttggcatatctctgcatcaattaactagcagatataactcttcttttctgcctaggttctgccaaaacaagtgattgcaacatataattggaccagcaactagatgatgtgactcttctcttctgcctgagccctggatatactgtgtattatgacacatggctgagtccaacatcaaggtaatgtgactctcctcaatgggttctgcccacagaggtattatgacatatctttatatttattatctaggttatgtgactcttttcatgtgcctgggccctgctgaagtagggattctgacataccactgaacctagcacctggatgatgtgactctcttttattgcctggttcctgcatattttgattattttcacatgtcactggctccagcacctaaataatgggagatagttgcttgtgccctgcatacagggggcattgtgatatgtgtctggacccatcaactatttgatgtgactctcctcttctacctgggctttgcaaataggaaagattgtgacatatctctgggacatatcttggtaatgtgagtctcctctcctgcctgggccatgcccacaaaagggagagtgacttctcactgggccaaggacaatgttgatgtgattcttctgcctggttcctgcacacaagagccattatgacctatctctgggcccatcatttagatgatgtgaccatctttttcctcctgatttctattcacagggggcatagtgcaagggtattgtgacatattgctggaccaagcacctaggcgatgtgactcctctctaatgcttggcttctgaccaaggaaaaattgtgatatatcactgtttccagcacctacgggatttgactctcctgaatgggccctgaatttattgtgtattgtgacatatggcttggtttgacacctacgtgatgtgactctcattcatatgcccactggggtattattacatatcttttctttatcacctaggtgatgtgactgaccacttctgcctgggccatgccgaaaaaaggagattgtgacatatcactgcattcaatacctagatgatgtaagttttttcttttgcgtggctctgcatatttttcatattgtgacatatcattggacccagcacctaggtgacgatactctattctcctgccttagcactggagaatagagtatcactggacgcagcacctagaagatgggactgtattctactgccttggcgcagcatacagagggtgttttcacatatcactgggccctgcacacaggttatgtggctctcctgtgacatattgctgggtccaacaagctggtgacacaaccctcctgctggggccctgcctccctggcattgtgacatacctctgtgcccatcaccgtggtgatgtgattctcttctcctgcctggtccctgatcacagaggggatggtgatatatcgctgaacccaacccctggctgacgtgacttttcttactaggctctgctcacagaggagattgtgtctttttgcttggcccaacgactaggtaatgttatttgttttgccttggccctgccctcagaaggcattgtgacatatttctgggcccagcataaaggttatgtgaatctcctgcttggaccctgctgacagggggaattgtgacatatctctggaatttgtcacatacaatttatcctaaattcccctgaaaattggaggtcatctctggttgctaattggctatattcaaaggaaaaataaacttatgctttcatgagaggtagtttggaaacttggagccaggtgcgtgatgaaagttggctcctatcttccaacaaaaagtgtggaatggagctctattttctttgctatttacattttaaataaatgattttcaggtcctagagaaagacagtcctgagtcagagatactcacaaaagacctatttagcagttagaataatttatatatatttcaagttggcagaaaaataatttaagtataaaagttttctgggctgggcgtggtgactcacacctgtaatcccagcattttgggaggccaaggcaggtggatcatgaggtcaggcattcaagaccagcctggccaagatggtgaaacgccatctctactaaaaactacaaaacttagccgggcgcagtgacaggtgcctgtaatcccagctactcaggaggctgaggcaggagaaccacttgaacctggatggcagaagttgcagtgagccaagatcacaccactgcactctagcctgggtgacagagtgagactccatctctaaaaaaaaaaaaagttttctaaagtgaatgtgtttaaaaaaagagaagagaaaaatctcttttttcatggacatctgaattctagtaggtgctggattcaggcacctgaggggtgaccttgggcatactgtgcacatcagaagggtttatggggaagtaaaagcagaagaggttgggcgcagtggctcatgcctgtaatcccagcactttgggaggccaaggtgggtgggtcacctgaggtcaggagttcaagaccaccctgacccacatggcgaaaccccgtatcttctaaaaatacacacaaaaaaatagctgggcatggtggtgggcacctgtaatcgcagccatttgggaggctgaggcaagagaattgcttgaacccaggagttggaggttgcagtgagccaagatcccaccactgcattccagcctgggcgatagagtgggactctgtctcaaaaaaaaaaaaaaaaaaaaagaaaggcaatagagggaaaggtgttatcaagaacccatgagtgggggacagtacataatagctgggagaactggtttatgctacagacactaacccaggcagggctatattctgacatgttcctgtgtccatacaggcagatgagattatgactggtggtccacaggtctaggtggatggagggaaaggttgctgctgctgtttgaggatcaagggtaggaaagagccaggagtcctctaggaacttgtgtgaattttttggtgagcaattctaggtgcaaaggccctataaacataattcctgatagtcaagtcttgttttgtggagggtgtggccacatctattcctagtgggtatgttcataagtaggtgagaatcgtgtggtagcaggttgggggcagggggtctgttctcagaactcctttcttctaagtcctcagtccccttttaccctgagaggagatctggaatcacaggacaatgtgcattgtgacagactgtgtgcaggggaacagagtttccctcctgcctaaacccctgggatattttttcctgacaccaaatgtatagagttttaacagcaaccaattctccaacaccaattggttgtccaataataactcaattctgataccatcctgagtcaacgcagacgccaaaagttcagggctcagtcccacaacactgcccccactgcagatcccagctgcgattattaggggcccatctatccttctgagctactgcctataaattgggggctcccataacctgctcctcaagtttaataacttaatataactactcacagaactcaacaaaacactatacatgcatttaccagtttattataaagatacaagtcaggaacagccaaatggaagaaatgtaaatggcaagaaaaagcggtgggggggaatggggtgggtaggtaacagcaacagctgtgattaaagaaatcccccatcctttgtgttttccaagagcatttactgcaaagaaacatctttcctgtttttgatatcacaaagccacagactctaaattcccttttttgggggtctcataaacaattaaataataagtttgtcttcagtggtcagaacaaaatacttgttaaccaaactttgtctaagtttctttccttcctcaggctcccaaactttgacctgaacttactctgagctgacacacaactcctctttatacccctcttaagaacaggctagccaggtgtagtggctcatgcctgtaatcccagcactatgggaggccaaggtgggcggatcacctgaggttaggagttcgaggccagcctgaacagcatggagaaatctcatctctactaaaaatacaaaattagccaggcatggtggtgcatgcctgtaatcccagctactgaggaggctgaggcaggagaattgctggagcccgggaggcagaggtttcagtgagctgagatcacaccattgcactccagcctgggaaacaagagcaaaactcggtctttaaaaaaacaacaacaacaaaaaatacaacaggctaacttctgggtgaaacattctctgatctgggacctgatttcaccatgttttattcctccctccccctcctacctttctttctgtcctgtttcctcctccttatgaaagaaagccctattctgcctaacttttgagatcttccagcatcttatagttggtgctttccctttgttgcaatactcctttaaaatcatgtaacttcttacctaaatctgaatttgtcttattttacaaaatctagaaatagccccaggaaaataacgactccatcctcagaaagagcttcccaaccccactttcatgccaatcccaactgtgtctgcctaaggatttccagcttttcagggttttgtcatttctctaagtataaaaggctctgtccatggctattgtgagcaggctagggcatctgcaggggaggctcctcaggcagaactggttgctccttcaataatctccctttgcaggcaaaactattgttagcttggggagtcactgaattcaggcttctacttcccagtcagggttattcacttagttttaaataagaaaatgctcaatgtttgaagaaaagagcaaaatcactcaaacacagtgtttatagaatattgtaaggaaattgtaaggcacttagtatctatttctttcagaaaataaacgtgtcatttaaatatttccatgataaataatttaataaataaccatatgggaacatttctagaaggtgctaagtctcatctcataaaatttagcattaaacttggacatccagaccacaggatacagaacacagatgtccactgttacaaattctagaccctgcaaaaaatgggagctgatgttttgaaaaatatatgcaattcaccagttaatctatcacatttgctgtggaaatatatcactttctgtagccataatgcaagagcgatttttcctatttatttccctggtagctttggtttttttttttttgttttttttttgttttttttgtttttttttgagacagagtttcactcttgttgcccaggctggagtgcaatagcttgatctcagctcaccgcaacctccgcctcccaggttcaagcaattctcctgcttcagcctcccgagtagcagggattacaggcatgggccaccatggccagcgaagtttgtatttttagtagagatgaggtttctccgtgttgatcaggctgatctcgaactcccaacctcaggtgatctgcctgcctcagcctcccaaagtgcaaggattataggtgtgagccaccgcactcagccttctggtagcattttcaaagaaaagccctggaattttacttgaaatcaccccccaaaaagaacacacataagaaacttactacactcactctggggataataaagatagataagaatctttaatgaaataaatatatgactagattttactgaaatccacctttctgggtacttgactcttgtaaaatgtcttaagttctactaataaaatgtaatttaaggtaattaaaaaactgaagttgaaataagtaaaataatctttccaaggtgacaaactcagggagtggcagtgccgattggaacacaaacatgtctgactcaactgtcaagtcagaccatggtatcactcaaaacattctcccattcccatcctacccattcaattactcagtgatcaccttcccaggagaaactgtactgtactccactgtgggcctcaggtacattttgttttgcaggttcttgcattgccttactaaaatgggttcttcttagtcctttggaaaaaaatttatttcttcacaaatctgatgaatccaaagggcaggaattatttctgccttttctcctcaatatgaacctctgattggctgatcaccaatgtgtctacaaagaataaaaattggggtttaaaaaaaccctttttttaactgcttgcacacttgtgcatttttatttcattggaggaaaatcctaaatacattgcagagtcaaggggtaaattaaaaaaataataatttcatttatttattttgagatggagtctcactctatcacccaggttggagtgcagtggcgcaatctcggctcactgcaacctccgcatactgggttcaagcgattcttgtgcctcagccttcccagtagcgggactacaggcatgcaccactatgcctggctaattttcatacttttagtagaggcggggtttcaccatgttggccaggttggtcttaaactggaataggaattaaaataaattaaagaatgtgtaaacagaaactcagctgtatgtaagaaaacccaattctccctgagaaagagaaagagctggagtcctttaaaaattaactgcctgtttttctgtggctagtgagccttatctcttctttcccaggcactgtttctctagctgtgcagctgcaaggtcactagacagataaactcaagtcgtaaaacatgtttttccttgaaaagtaagaatgatgtaatgcatgtctcaattaattgaataactgtctttctttctcgcttctgtaatatgcttccccctgcacagatctcccccaaccccacaaaatgcttaaaagataacttagctctttgttcagggctcagtcctttggatgtaatccgactaggccagtgaacctaaataataaatatcctcctcaacccctcggtctccctgattctttaaaatatcctgcaacatttctgggggcttatctgggtttggagatgatagatttactgtctcctttgccagtgtgtctagggccccggggatgggggagacccagcatccaagacgcaccatgagggggtttcacctggatggagaccagctctccccatgtcctggtgccctgcccagcagtgcaacagaactggggacagagatgcaggacaataccagcacttcaggaaccacgataaggagtagtggcccaaggcaggaaagcccgtcccatagggatgaaggggactgaccattaatccaacccagagtggctgggggcagcaggagtggcctgccaatttgattgaacctcgtgtccccactaacaaagtgaaaatggttcacagaatctggagacaggaactgggggtgtgtgggtgcatgtgaacctacctgggacatgagagaggctcatttcatccgatgaggagtcctggggtaggagtgatgggtttatgtgtgtgaatgtgggagcctaactaggctcacccaggacacaagagaggttcatttcatccagtgaggagtcctggggcaggggaggtgtgtgaaagtgtgtgaaagagatggtctcaggagaggccaacatggggactgatgtggggaggcacagatcccttagtgcaggctgtgtgctctgaggcgagtgtaggcaaaatcaaacctaggatgttgcatacggctgataggatcagctttgcagctgcagcaggctgtgacaggggaaggcacattcctggctaagcagcatccaaaactcctgtaataggacccagtctggtgaacctgagggtgaaaatgagagtgagagtgcactgcaagggaggaaatgagagggaaagcattgaaaccaactcctttggagtgcacgataaagaatttttttaaaaaaggatttagaggtgattatgggatgaaactggatgttcaaaagttaaagacatactgtgaattagaatagccctgttttagtgttggatggctggccgaaggcactatagagaaattggccatgtgttttaaggtggtgactaggatcagaggacagccaggacattcagacctagtctttatattgactcatggctaaatgaatgcagccctgcttagcagtttattgtagaacgctcacagctcatgccaagagaaaccagctgcactggcagctacagagttaaagggaaagtcacagaggcttatagcaccaaaagcaaaaagtgaaagccaaaagtgaaagtaaaaatcagccaccctggcagctatggagacaaaagaaaagtcttaggaaaaagaaaaccagttttgcaagaaccacaggagggaatagagacccctcctccctacattccaatctacccccctttaccaaggctaactgcccctaaggagttaagttcaaagagatacaggctcccagtctcacccgagaaagagaaatcagagctctgggaagttaaagcgaaaggctggaaaagtcaggcaggccatctcaggtcgagccatgcccaagttatgcttctgcctctaaaaaggacaagaggacccccaccaggatgcagatgatgcagtccaccttcagcacccacaaaagtgccgagaagcacttctgcaaaggctaaaggatggtaaaagaaaaaggcaaccaatataaaacatctcagaggtgctccagggtgcagataaaagcaccagccagttttatgaaagactttgtaaggcattttggttgcacactccatttaaccctgaggctgctgaaaatcagtgcaaggtgaatacggcatttgtaaggcagacccaaggagatatcaggcataaattgcagaagttagaagctctgtaggcatgaatgctactcagcttattaaagtggctaccagggtgtacattaacgagatcaggaggcaaagaagaaagctgatcagaggcttaagaaaggctaatttactagcagcagcccttgtgggaagagaagctggctttgcaaagaggcatggacgcaggcgtgaacacagtcacggaaaaggctagtccggacaggagtttgaaagctggccaaggctagagagagatttatgtgcacggtgcaaaaggaaaggacactagaaggatacacgtcaaaagaataaggagaatgggccgggcatggtggctgacgcttgtaatcccagcactttgggaggccgaggcaggtggatcacgacgtcaggaggtcgagaccatcctggctaacacggtgaaaccctgtctctactaaaaatacaaaaaaaaaaaaaaaaaaaaaaaaaaaaagccgggcatggtggcaggcacctgtagtcccagctactcgggaggctgaggcagaagaaaggcgtgaaccctggaggcggagcttgcagtgagctatcgcgccactgcactccagcctgggtgacagagcaagactccatctcaaaaacataaaaagaataaggagaattgtcaaggccatggtatgaaaaaaaaaaaccaccggccaagggctactgcacccaggaaaaacccaagaccccctgcacctgctgtgaaaggcaggatataaagtatcagaaaacagctcaaatctgctctaaaagtgtccagtatttaagcttttatataaaccaagaggaaagatggcttagtagtaaacaaaagcaggctgtttgtgtacttcctactccaacaacctggtgtcaaataagagagttcctaagggcagcaaggttctgccacatttagatcccaaatttcttgctcatggctaagccattatacaaagccacaaagaggaggaaagaaagagcctctcctctaggaggccaaccaggagaaggcttttatttatttatttttttttgaagccactccacaagtcactctatattgcaaattatacataatagtacacctaatcaatatataaatgttatgggttaaacatctacaacaaacaaaataacatttaacatcaagagaaaagaaatgggaaaaaaaggttaatgaaccagtccatgaagagcaacagagacaaaaagaatctcctggtctgggccaggcagtccagtggtcttgcaaggaacacctttgatgtgggtagagcctttcgtggcagatgccagagcctttcatggcagatgccatggagcttatcttttttttttttttttttttaaattgatcattcttgggtgtttctcgcagagggggatttggcagggtcataggacaatagtggagggaaggccagcagataaacaagtgaacaaaggtctctggttttcctaggcagaggaccctgcggccttccgcagtgtttgtgtccctgggtacttgagattagggagtggtgatgactcttaacgagcatgctgccttcaagcatctgtttaacaaagcacatcttgcaccacccttaatccatttaaccctgagtggacacagcacatgtttcagagagcacagggttaggggtaaggtcatagatcaacagcatcccaaggcagaagaatttttcttagtacagaacaaaatgaaaagtctcccatgtctactactttctacacagacacagcaaccatccgatttctcaatcttttccccacctttcccccttttctattccacaaaaccgccattgtcatcatggcccgttctcaatgagctgttgggtacacctcccagacggggtggtggccgggcagaggggctcctcacttcccagtagaggcggccgggcagaggcaccccccacctaccagacggggcggctggccgggcgggggctgaccccccacctccctcccagatggggcggctggccgggcggggggctgacccctacctccctcccggatggggtggctgccgggcggagacgctcctcacttcccagaccgggcggctgccaggcggaggggctcctcacctctcagacggggcggctgccgggcggaggggctcctcacttctcagacggggcggccgggcagagacgctcctcacctcccagacggggcggcggggcagaggcgctccccacatctcagacgatggggggccgggcagagacgctcctcacttcctagatgggatggcggccgggcagagacgctcccaggagaaggggtttaaagaaatcaaaaaagcttgactcaggccccagctttaggactgccggataaactaactaagcctatcttcttgtatgtccacaagtgaaagggaggccataagggttctaactcaagccataagtttatggcatcacccagtgacatacttatccaggcaattagactttgtggcacttggatggcctctttgttttaaagctattaaagcactagctgccactgccctactggtgcaagaagctaataaactgactttagagactgtgaatagcctaaacctggctacattgctcctcatcaagtcagtgccaggagacccctttcatttctgtgtcaacatgatagatgaagttttctcaagccagagagatttgatagcccctcagggaaactggacattaaatattttactgatggaagcagtttcatactaaagttttatgaaagactttgtaaggcattttgattgtgcactccatttaaccctgaggctgctgaaaatcagtgattttcactaaaatcactaaagggagtctgccgagctgggtatgcagtggtgactttggactcagtagtagaggtgcagtctctgcctacagaaacttctgcttagaaagcagagctaatatctctgacaagagctctctggctagcaaaagaccaaaagacaaatatttacacagattccaaatatgcttctgccactttgcatgttcatgaggtgatttacaaagaaaaaagacttttaactgctgaaagtaaagaaataaagtacaaggaagaaattctacagctcttaaatgctgtataggacccaaaagaggtggcagtgatgcactgcaaggggaaccaaaaaaggaagaacactaaaggctaaaaaaataaaaataaaaaagcagacaaagaggcaaagcaggctgcaatgacaactccaccttctaaagaggaagtcttagctatgcttctcttcccagagattcccctcccggagatcccaagctatgctccaagtgaaagggcttgttttgcccagaaaaataagaactacactaaaggaagatggtaaaaattctccagtgggaggctagccataccagaaatggtgacctccagatttgtaaaacaattccaccaaagaactcacataaaaaaaaaaaaacagcactaaagacattattaaggcatcatttctatgcaccatggctcactgctattactcaagccatttgtaaacaaacagtgtttaacttgcactcagaacaatccatgacaaggagggcctactccgcccctgggagttcaggaaacaggagccagggagccgtgccctgtgaaaaactgcttatagacttcacctaattgccctgagagggagggctatcagtacatgttggtgttcatttgcaccttttcaggataagtcaaggccttcctcacccagacagggaaggcactagaggtgaccaaggtgttgttaaaagacattattcccagatttggactgtctctaactctaagatcaaacaatggaccaacatttgtggctgaaatagttcaggactttacttgactattaaaataaagtggaaattacatacagcctacaggccgcagagctcaggtaaagtggagtgcataaaccagacactcaaacagctgctgaagaaattttgtcaaactcatcaaaagtaggatcaggtcttgtctgttgtcctcctccgagtcaggtgcactcccaccaaacaactgggtattcgccctgtaagattttattcagccagccaccccccatcataagtcagattaaaggtaatctctgtaaactagaagaactaactttaagaaggcaaattcaggctttaagtatggccatgcaaaaatgcatggctaggtatagaaaaaaaatgcctataagtcaaacagacccagtacaccctttcaaacctaaggattttgtttaagttaaaaaatggaggcagggtgtggtggctcacgcctgtaatccaagcattttgggaggccaaggcaggtggatcacatggtcaggagatcgagaccatcctggctaacacggtgaaaacccatctctactaaaaatacaaaaaattagcccggcatgatggcgggcccctgtagtcccagctactcaggagtctgaggcaggagaatggcgtgaacccaggaggtggagcttgcagtgagctgagattgcgccactgcactccagcctcggcgacagagcgagactccatctcaaaaaaaaaaaaaaaggaaaaaaaatggaatccaaccacactaggacccatataggataggccccatatcgtgatcatgcctagtcccactgctgttaaagttgcacgtttcacaccttggattcaccatagtcggctgaaaccagtggcagcagtgactcccaacgacgaacagtggattagccaacaagacccagattgccccacccgaatagtcccatggtgaaacccaaccaccggtaagaaggacaactgccctgctctgaccacactggaggctggtcagtctatgcacggctgaagcttgaggatcctgtaagctctgctctagtcacatcctggaagctgactagtctacgcacagccaaagctaaggggacaatctccggataagtaaatgtggatacaatttataagcctagttataattctgtcaatactgattgttctgttgttatgttattactgcaaatactgcaaacgtctatgcccagaggaaggtttgccatgcccatgtgtagtgtaagcatgtttctattacatacactgacgttgttaccatttctgcctatactagaaggggagaaatccctagaagaatgcccacactgtgtacacactacctggataaggaataccctagttaaacctctactgtacgttactgactatgaatgtacaggaacaaagttaggaacctgcacatacaaccggaaacagtctgcaatagtttaacacaagagagacttagcagcaacagtcctaaacatctgtacagaaaaccacaaatcagatgtcgagactgaacattcagtggtctatgctaacacagctccaacacttacattcaggaaggactgctctgctaattagtatgtcaaccaaaccagattgtaagacaagaacatacaatcctttaaattttactatcttaaagccagagctaccttcttggtctacaggacagatgacactattatgagttgatagacaaggagcagaacttggagttccactactaattgtcaaaaagactagaaggactcaaatgtatccaaccccacaattccaggtccataagtcattctataagcattttgatcagtcaatgctgaagcttccccccatcaaccaaaaacttatttgctcaactagctgaaaacatagctggcagcttaggaatttcctcatgctatgtatgtagaagaactaatatggaagaccagtggccatgggaggcaaaggaattaatgccacaagatcccttcacttaacactgccagtgaaccaacagcctcagccagtgtttggttgtcaactacctccataattggaaagtactgtatcacccgatgaggaaaggctttcacagaggcagtgtgagaaacaacctgcctagggcaacagtattgtgatgagactaaaaacaaaactctatggagatccaaaccctttctctcaattctctactctaagccacacttggcatcagctagaggctccaaattcttgaaaggcaccctctggcctatattggatctgtggagcacaggcatatcagcaactgccagctaaatggacaggggcatgtgcgttaggaacaatcaagccatcattctttctaattcctctaaagcaagaggaactcttagggtatccagtttatgataaaaataaaaaaacaactagaagcataataacaaaaagagacacaaatatcaaaaaagatgtggacataggaaactagaaagataataaatggcctcctgaaagaatcattaaatgttatgggccagctacctaggcgcaagatgggtcatggaggtaccgtaccccaatctatatgctcaaccgcatcataaggttgcaggcagtccttgaaattataaccaatgaaacctcaagggcactagatttattggcaatacaagcaacacaaatgaggcatgccatatatcaaaataggctgggtttagattacctattagcctcagaaggaggagtatgtgaaaattttaatttaaccaactgttgcctagaaattgatgataatgaccgagctgtcatggaaatcacagctagaatgcacgagttcacctatgttccagttcaaacttgatctgggtggtccctggattccttgtttggaggatggttctcaaccttaaaaaaaaaaaaattaaaaccctcattggtgggttcttgcttatttttggcatctgcctcatcctcccttgccttttacctctgtttattaggagtattcagtcaactatagaggcaatagtaaccaaaaaaactaccgtgcagttgatggcattaacaagattatcagccactgccagtagaagaagaagcacagccctgtgaagaggtgacagatagtggtgctttctgttaacatctttgttataaaaagcaccaaagggaggaatggaacaggaataaaaagaaattaaagaatgtgtaaacagaaactcggttgtatgtatgagaaagagaaagagctggagtcctttaaaaattaactgcctgtttttctgtggctagtgagccttatctcttctttcccaggcattgtgaagactctgtttctctagctgtgcagctgcaagatcactagacagatcaactcaagtcataaaacatgtttttccttgaaaagtaagaaatgatgtaatgcatgtttcaattaattgaataactctctttgtttctcacttctgtaatatgcttccccctgcacagatctccccctgccccacaaaatgcttaaaaggtgacttagctctttgttcagggctcagtcctttggatgtaaatctgactgggtcggtgcacctaaataataaatatcctcctcaatccctcagtatctctgattccttaaaatatcccactacagaactcctgatctcaggtgatctgcctgcctcaacctccaaaagtgctgggattacaggcatgagccattgcatgtggcctaaaaaataatttctttaaaatggtatactctgcatcaacattgacacaaaagcttctgttaaactctgacacccactcagatgtcacctcctctataaaaccctccttgatttccctcactgctatctcagggggagaattaatcactactaccatttggctgcctcaataccttatatctttttatgtacaagcattattctccagaataaattaatcatttatgcatctatccacactaatggactataaatggggcagatatgttgaaccctactcatttatgtaatccaaatatctgatacataataggtgttatatatgtatacacatggaatcaaaatgctctcagggaattattggaaaagctaccaaattctttttattttttaattttttttaagttcttttaagttcaggggtacatgtgtaggtttcttacataggtaaatatgtgtcatgggagtttgttgtgcagattatttcatcatccaggtattaagcctagtacccattagttgttttttctgatcctctctctcctcctaataggccctagtatgtgttgttccactctatttgtccatgtgttcgcaccattcaactcctacttataagtgggaatatgtagtatttagttttctgttcctgtgttaatttgctaaggataatggccccctgctccatccacgttcttgcaaaggacatgacctcattttttatggctgcatagtattccatggtgtatatgtaccacattttctttatccagtctatcattgatgggcatttaggttgattccatgtctttaatattgtgaattgtgctgcaatgaacatacacatgcatgtctttataacagaagaatctatatttctttggctatatacccaataacaagattgctgggtcaaatggtatttgtctttaggtctttgaggaatcaccatactgtcttccacagttgttgaactaatttacactccctccaacagtgtataagtgttcctttgagaaaaacaaaaatctcaatgttctaagaggttagttttttaggcaaatggtataccaagagactgtcctcaggcccaggccatccagctgctcctctgagaggctacactcttattcctcagactgtcctctaagagatgacccaggggatgatattcattagacactccaagagatatggccattatgggcatcttgggttatcccagacagttctaatactcatgaacaagaaaagaccggagggctgctgtaaagagccctgtaatttctccaaagcaaaactgcaacccaaagacatactaataaggtgtgtgtgcctagggaagataaaaggaagagaggcacacagattttttttttttacagtgaagtgtcagaggattattttctacttttcttttctacatttgagaatgtaggaatgaaagtggaaatgtataattttactgcaagcctgagttaggctaggggaaaagagtggtggattagaggccctgattgccatacattaggaagacacagaagaaaaccagtcctgctctccctctccctctccctctctctccacggtctccctctgacgcccagccgaggctggactgtgctgccgccatctcggctcactgcaacctccctggctgattctcctgcctcagcctgcggagtgcctgggattgcaggcgcgcgccgccacacctgactggtttttgtattttttggtggagacagggtttcgccgtgttggccggactggtctgcagctcctgaccacgagtgatctgctagcctcggcctcccgaggtgccgggattgcagacggagtctcgctcacttagtgctcaatgttgcccaggctggagtgcagtggcgtgatctcggctcgctacaacctccacctcccagccgcctgccttggcctcccaaagtgccgagattgcagcttctgcctggccgccatcccgtctgggaagtgaggagcatctctgcctggccgcccatcatctgggatgtgaggagcccctctgcccggccacccagtctggaaagttaggagtgcctcttcccggctgccatcccatctgggaagtgaggagcgtctctgcccggccgcccatcgtctgagatgtggggagcacctctgccccgccgccccatctgggatgtgaggagcacctctgccctgccacccgtctgagaagtgaagagcccctccgcccggcagccgccccatctgggaagtgaggagcccctccggccggccgccaccccgtctgggaggtgtacccaacagctcattgagaacaggccatgatgatgatggcggttttgtcgaatagaaaaagggagaaatgtggggaaaagaaagagaaatcagattgttacggtgtctgtgtagaaagaagtagacataggagactccattttgttctgtactaagaaaaattcttctgccttgggatgctgttgatctatgaccttacccccaaccccgtgctctctgaaacatgtgctgtgtccactcagggttaaatggattaagggcggtgcaagatgtgctttgttaaacagatgcttgaaggcagcatgctccttgagagtcatcaccactccctaatctcaagtacccagggacactaacactgcggaaggccgcagggtcctctgcctaggaaaagcagagacccttgttcacatgtttatctgctgaccttccctccactattgtcctatggccctgccaaatcccccaagaatgatcaataaatactaaaaaaaaaaaaaaaaaaaaaaaaccagtccttctgtggagtgttaaaaatcattaaagagcacgaacttagactgaagtggctctagtgccctgtgttcattggtaaaaaatctaaaacctaactcaaatgcatgtcttataaattactcttaggcagaaacaaaattcaggcttatccaatcataaacctgcaattaacctgattacataaccaggaaatttctacctggatcatacaaataaggtgacaacataactgtaaccaattattgaatctggtttgccttctgacacactttataaaacccttttctttttttttttgagacggagtctcgctctgtcgcccaggctggagtgcagtggcgggatctcggctcactgcaagctccgcctcccgggttcacgccattctcctgcctcagcctcccaagtagctgggactacaggcgcccgccactatgcccggctaattttttgtatttttagtagagatggggtttcaccgttttagccgggatggtctcgatctcctgacctcgtgatccgcctgcctcggcctcccaaagtgctgggattacaggcgtgagccaccgcgcccggcctaaaacccttttctttatgcccctcaggtggacctcaaatcatggctgggtgctttccatttcaccaatcactgtttgctcaaataaacttgttaacgttttaacattgactccctttaatttttaacaggagagactgagcatggtggctcatgcctgtaatcccagcactttgggagaccaaggcgggtggatcacctgaggttgggagttcgagaccagtctgagcaaccttgagaatccccatctctagtaaaaatacaaaattagccgggcgtggtgctgcatgcctgtaatcccagctactcgggaagcggagacaggagaatcgcttgatcccaggaggcgcatgttgcagtgagccgagatcgcgccattgcactccagcttgggcaataagagtgaaactccgtctcaaaaaaaaaaaaagttaatatgcagaaacagtgttaatcaataggacagccctcagacatggtttgtggtttgggggctaccagcgggtcttgaagaaaaggctcctataaggtgtatgagaaagcaaagcaaattaaatagctgattggatacagttaggtagtcgcttcatttggagtgtccaggagaagattttctggttatgtaatcagggattaattggagatttatggttgattaagtctgaattttgttttctcctaaggtagtaacttacacaaaatgcatttgagttagattttttttgttgttgttacataggcacctagaccactagagccattccagtctaattacctgctatctaattattttaactttattcaggggctctggtgtccccctacattttccaaatgtgtggcaagcaggtcctcaaatccactactctgttctgccagcctaacttggcttgcagcaaaatcttattttttatttttatttttatttgagatggagtttcgctcttgttgcccagactggagtgcaatggctcaatctcggctcaccacaacctccgcctcccggattcaagcgattcttctgccttaacctcccgaatagctgggatcacaggcatgcggcaccatgcctggctaattttgtattcttagtagagatggggtttctccatgttggtcaggctggtctggaacaaccgacctcaggtgatccgcccatctgggtcccccaaagtgttgggattacaggcatgagacactgcgccaggccagtaaaatcttaaatttccagtttctttcaaatatttcccagagccaactcctcccctccaattcacaacattatcaactatttttgtcctttattttacattttagaaacagcattttaattaatcacttattcacagagctgtggatggcactctttaaaatacttgttttctttcctttttttttttttttttttttttttgaaatggagtctctcactgtcacctgggctgaagtgcagcagcacgatgcgatcttggctcactgcaacctctgcttcccgggttcaagtcattctcctgcctccgcctcatgagtagctgggattacaggcacctgccaccacgcccagctaattttttgtatttttagtagagacaggtttcactctgttggccaggctggtctctaacacctgaccttttaatccacctgcctcggcctcccaataaaatagttgttttctatttgtaaattttttcatgagaggaaagcataaaatcatccccttacactccactgtcaaaaatctttctgccttttctccttttatcttccctaggcacaaatgccttatcaggacatcgttggattgaggtttccctttgaaaacttgatggggccatgtgtcctcagccacactctgatctctttctagtcttgagttttagaactgtcttgggatggcccaagatacacacaacagccatgccttttggaagctttggtgacgaccagccccttcgtcttctccttccagaggacaccctgacatatgggaatgtagcttctcaggagagcaactgaatgccctggggctcagataaatatcctggcttacccttcccataaaaacagaaccttttgggattttaagattttcttttcccaattccagttcttgctggttagccaatcagatggtggtatttagagaaaaaggcagaaatcatgtctgtcctcagaatagtgtcatatttgtgaagggagaaaaactatgctgaaagacgaaatagacctaccccatggaggcaatgcaagaacctgcaaagcaaaaaagtaccagggacacagagtggggtacagtgcagtgtcttctgggagggtgatctttgagcacttcggtgagtagggtaagggtgggagaatgtcccaagtgatagggttgcctgatttgacacttgagtcagatatgtgtctgttgcaataaacactattactccctgagtttgccaccttgaacagatttgttcacttatttcaactttggttttttattagatgtaaattgaattttatcatcagagctcaaaaggcaaaaaacatacttacaaagggcatgaaagaggttaatttcagaaaaaattaaatatttggtcatatgttttacttagtagaaattcttatttacttctttctccaccagagtgagtgcagttaaatttctttggtctgtcctttttggggcatgattacattagtttctcttttttgcaagctgcagaatttttaatattttgaatctcttttctgtatcttgtcacctgaatgtgtgagtctgatgctaaattttgttttttgttgttttgagacagagtcccactcagttgcccaggctggagtgcagtggtgcgatcttggctcactgcaacctctccctcccaggcttaagctgttctcctgcctcagcctcccgagtagctgggattacaggtgcccaccaccatgcctgactaatttttgtatttttagtagagacggggttttaccatgttggccaggctggtcttgaactcctgacctcaggtgatgcacctgtcttgccctcacaaagtgctgggattacaggcgtgagccaccatgcctggctgaagctaaattttataagatggtacttggcatcttctagaagtatttacatattattaacttaattatttattaaattttgtttttcaagatggagtctcactctgtcacccaagttggagtgcagtggtgtcatctcagctcactgcagcctccacctccagcgttcaagaggttctcctgtctcagcctcccaagtagctgggattacaggcatgtaccaccacgcctagctaattttttttttttgagacaaagtcttgctctgtcacccaggctagggtgtattggcgcaatctcagctcactgcaagctccgcctcccagtttcacaccattctcctgcctcagcctcccaagtagctgggactacaagtgcccaccaccacacccggctaatttttttgtatttttagtagagatggggtttcaccatgttagccaggatggtcttgatctgacctcatgatctgcctgccttggcctcccaaagtgctaggattacaggcatgaggcactgcacctggtccttttttttttttttttttttttgaggagtctcactctgaaacccaggctggagtgcagtggcagaatcttggctcactgcaacctccacccccctggttcaagcaattcccctgcctcagcctcccaagtaactgggattatagacacatgccaccacatctagctagaattcctgattaaagttaaaataattagataacagctaattagactgatgtggctctagtggtctaggtttctgtgtaacaaaaaaaaaaactaactcaaatgcattttttgtaagttactaccttagaagaaaacaaaattcaggcttaattaaacataaatttccatttaatccctgattatgttaccagaaagttttctcctggacactccaaatgaagcgactacctaactgtacccaatcatttatttaatttgcattccatcctcatacacattatagaatccttttcttcaagaccctctggtagcccctgaaggggtggcctgcccctccacacctgtgggtatttctagtcaggtgggactgagaaaagaaataagatacaaagtatagagaaacaacagtggacccaggggaccggcgctcagcataccaaggacctgcaccagcactggtctctgagttccctcagtttttattgattattattttcattatttcagcaaaaatgaatgtagtaggagagcagggtgatgataaggagaaggtcagcaaaaaacatgtgagcaaaagaatctatgtcataattaagttcaaggggaggtactatgcctgcatgtgcacgtaggccagatttatgtttctctccacccaaacatctcagcggagtaaagaataacaaagcagcattgctgtaaacatgtcttgcttcccaccatagggcggtttttctcctatcccagaatagaacaaatgtacaatcgggttttatactgagacattcagttccccggggcaggcaggagacagtggccttcctttatctcaactgcaagaggctttcctcttttactaatccacctcagcacagactctttacgggggtcagactgggggatggtcaggtctttctcatcccatgaggccatatttcagactatcacatagggagaaaccttggacaataccccactttcaagagcagaggtccctgcggctttctgcagtgcattgtgcccctggtttattgagactagagaatagtgatgacttttaccaagtatactgcttgtaaacattttgttaacaaggcacttcctgcatagtcctagatcccttaaaccttgatttcatacaacacatgtttttgtgagctccaggttgggtcaaagtggctggggcaaagtggctggggcaaagctacaaattaacaacatctcagcaaagcaattattcaaagtacaggtctttttcaaaatggagtcccttatgtcttccctttctacatagacacagtaacagtctgatctctctttcttttccctatagcccccaaaccacaaactatgtctgggggctgtcctattgattaatcatggtttgtacatattaactttttttttttttgagacggagttttgctcttgctgcccaggctggagtgcaatggcacaatcttggctcaccgcaacctgaacctcctgggttcaagtgattctcctgcttccgcctcctgagtagctgggattacaggcaggcatcaccacgcctggctaattttgtattttcagtagagatgaggtttatccatgttgctcaggctggtctcgaactcctgacctcaggtaatccacctgccttggcctcccaacatgctgggattacaggtgtgagccatgccacctggccttaaatattttttatagaaataattaaatgacagattgtgggggattagtcaaaatggggggagaaattatagggaaaggagcaggccttttgaaaggtcagaaggctctgcaaaactttgtgggagaataagctgatggcagccgttctcttaccctgaggcagagggtgaggagtaggtacaagggaatgtaggggaatttatcttaaataggcttgtttgctcgtgttgtccagaagctgacctttgatcatccgtgctcttgactgctctctgaaagggggaacaataatgttaattacctgcagattgtgtttgctccaggctttccgtattatgtctgtactgaataaaagcaagcagctccagctgttcggggctgctctcgtctttgaccacaagtgctggccagtcctctagctgctcttacactgcatacctgtgtctgagtactcctttcattcatcaattggccagggtctatgggacagacctggcagctggtgccccatgtgaacaaagctgcaatggaaccctcaaaaacaaaggtgaagagactgtgcagtaagtaatcagtgcccattcaggatttccaagtttgaggggattttcaagctagggtttcatcatgggacaacagttatcagctcaacagcaacagcatataaaagtattgaaacagctgcttcaagctagtggagcctcagttttggaagcccaattaagggacctaatgcaaagtgttgtttttcataacccatggttcccagaggaaggcacactagacctagagctctgggaacaagtggggagaaaacttagatgacatcatgcgcaagggcaacaggtcccagtaacatctttaatgttagggggctttgttatggctgctttggccccgctctacacagaagtgcctaaaaagggaagggaggaagaaccatcatctaccttaccacctcctcctcctcccccagccctgctgttaccaggtaaaggtgccacagaggagacagagattttccctgtgccccctcccccagtaaattggaaaaaagacaagggatacactacagttatgggaccctgtcttaggcaagcagcattagaaggggagctcttggcatgcccggtgatgcaagatcaacaaggcaattgggtacatgaacccattacttttaacacctataaagatgccacagcagccaacttccatatgaccccatgagactggccactactagctaaaacaactttagaagccagtcaatatctcctctggaaggcagaatatgatgagttgtactaacaacaagccaaccagaatcagttggctgggcaaaacataacggccgctatgctccaggggaggggtccctatgtcaatgtacaagaacaattaattttgttccccaggcctatgcacaagtgtctttgtgtgctcgcagggcttgggactgaattcctgaagatggagttcaacagggatcttttgtgaatgttcaacaagggcctaaggagccatttgttatcagtcggttaacacaggcaattaagagacaaattagtcacgcccaggctgctgaaatcttattgttgcaattggcttatgaaaatgctaatgtagactgccagcaggcaatgcaggctattgtattaaagcctcctaaagtgaaaagggagaaaaacccaaattgttttctatgcggagagccaggtcatgtgaagtgggaatgccccaatagtaaagaccaaagtaactcaggaaaaaaaaaaaaaaaacccttctacatgcccccgatgtaaaaaggggaaacactgggcaaatcaatgcaagtccaaatttgataaaaatgtcaaccccctaagcaatcaggtgggacatttcatgaggggctggccccaggccccattccacactggggcaatgccagtggctttcctcggttagatggaaagcccacagtcctctctttcagagcagccaccttggggagcgcaggactggacttactctgccctgacaaattagtgctaaaagaaggagaacaccctaaagggttgcaacagggatctggggtccactgcctctgggaacagtgggactggtcctagtgcgatgaaacctatccagtaaaggagtcaatgtgctcactggggtaattgatagtgattaccaagatgagatattaattatgatttaatgtaaaggtctacatattcttccccctaaatctaaaatagctcagttactactcttaccatactgggttcccaatgcccagggaaaggaaaggggacaaggaggttttggaaacacggaagccacaggagtatattggaaccaatcaatcactgatcagagactcatgattaccttaaaaattgaaaataaaaattttactggcctattggacacagggtgaacattttgatcatcagtgatgaaaactggccagaaacttggccttgggtcactcagaaacaaaaaattgtcatcatcagggaagtgcacacagccaagcagagcacacaccccttaatatgtcatgattcagagagaaggaaagcagttatacaacctcaaatcatgcccatcccagttaatatttgtggatgggacctattagcccaatggggggttactctgcagacctctttctaataatggccactgttgttattcctcccctacccctgacgtggctctctcaagatccaatttaggtagaacagtggcctttgaagggagagaaattacaatgagcccataaattagttgaggagccattaaaagctggccatttagaaccatcagacagcccttggaattcacctattttcgtcattcccaaaaagtctggtaaatggaaacttgtgcatgacttatgtgctatcaatgctaatttgtaacctgtggggccccttcaacaggggctccctttccccacggtgattcctcaagattggcctatattcattattgacttaaaagactgcttttatattatttcccttgcagaacaggaaagagaaaaatttgcatttacaataccagctataaataatgaaaggccagctcctccaattcattggaaagtacttcctcaaggaatgctaaacagtcctaccgtgtgtcagtatcatgtaaatcaggctttgcttcccagtagaaaagaatttcctaattgcaatatcatctggatgacatcttactggtggccccaatggagccaatacttttgagtttatatgcccctgtcaaaaggaatacacagttaagaggtttaatcatagcacctgaaaaggtacagatgtcctccccttggaaatatcttagatacatactaacttcccggtcagtaagacctcaaaatgttaaatactagcaacttatataccttaaatgattatcaaaaattactaggcaatattacctggcttcaccccaccttggacataactactgataagttgcagaacctgttttctatcctaaagggcaatgaaaccctggacacccccaggtatttaacctccactgcaaatagggtaattgaggaaatagagcaagctatttctcataggaaactagattgcatagacccacaatattcagtccagttgtttgtttctcctacaaaacattccccaacaggattaataggacagatggccccagggctgtgcttcctagaatgggtttttgctcacacactgggactaaaacactgtccccctatatccagctaattggtaaagtcatttatacaggccacagatgatgcaatcgattgcaaggttatgactctgatgtcataagaatacccttaagtaaaaaacaattcgaaggagtcctgcccttatctctagattttttcttttttttgagacacagtcttgctctatcacctaggctggagtgcagtggtgcgatctcagctcactgaaagctgcaagctctgcctcctgggttcacgccattctcctgcctcagcctccctgagtacctaggactacaggggaccaccatcacacccggctaattttttttgtatttttagtagagatgggctttcactgtgttagccaggatggtctcaatctcctgacctcgtgatctgcctgccttggcctcccaaagtgttgggattacaggcatgagccaccgcacccgaccttatctctagttctttaaatagcactctctgattatgtgggccatatagaaagtacccttcccgctgatgaactactctagctcttatactcctgtaattatgcctacaaaggtagttcactcccccatacctaatgtgctttaacagttttcactgatggctctggtaaaaatggaaaagcagctatctggtgggaaccgcataacttcctcactcgatctagatttactagtactcagctaaagttggagccctagtattggtcctggaaaccttttccactcagcccatcaatattgttaatgactctgcttactccatttatttattgcaaaaccttgaaacagtcctcattaagtcaactcttgagcccactctgtgtgccctttttctttgacttaagaaattgctacattaacaaacacatcctgtttttatcacacacatttgggcccaaagcttgctgcccagcccactagttcatgacagcaatcaagcagacctgcaggttatgacgtcacttgcttgaccaagccacccaatcacaccaatttttccaccaaaactggagaaacttaactaaacaatttcaatttacccaaagactagataaacaaattatcctgcaatgcccagattgccagctcacaggcacatcccctccttcaacagatgttaaccttagaggactagaacctaatcagcatggcaaacagatgttacacatgtccctgaatttggaaaactaagatatgtacatgtatccattgatacctattcccacctaattagcgctcatgttcttcctggagagtccatccaatatgtcattaaacatcttctcttaacttttgcatttatgaggtggcccccaaaaaattaaaactgataatggtccggcttatgccagctcacagtttcaccaattttgtcacacatggaacatcctacattccaagacatcccatataacccccaaggacaggctataataaaaagtgtccactctgcccttaaatatgctcagaaaacaaaaaaggggaaatatgagtaaggaccctgcaacacttttggcacaagccttatttaccctgagtttcttaaatttagatgataaatttcaatcagctatagacaagcaccttgcaaaaatcactcaagatataaaaccttcagttttatggaaagatgtaaatagtaatgtatggtgtggtccagatgatttgctaacatggggaagagggtatgctcgtgttcacaccccctcaggtcctctttggattccagcacgaggcatcagaccttaccatggcttggctaggacccaactcggtatcagaaatgaaggaaatgacactgcaggacctaacagccctggacgatgtggcttcctaggacaacacagaccccggacattatgctgaagaagataacttaggaggctgagtgaatcctggtccagacacagacacattcactccagataatttgttccttgctatgctttctgttgtacattgcaactcttgtagggtattaaccttttttattctctcactttgcctgctactgttggaggccaaaggaatgagggttgtgaccaactcagtataccactggaggctatatgagcaaacagcaaactgttcttgttaggagccaaaagcctgacggttgtgaccaactcagcatcccactggaggctatacgattaaagagcaaactgtttatcatgaatgcaggatgtgggcaaactcacatctgtgcctgccaccagaagatatgctgagggcagtcactccctggcactgtgctccttgcagttgtctactggaacatctggagtctactgttcaaagaaagcattcgtgcaggcctgcactaaatcaagcagctgattgacaaccacccctttctccctatttcctttacttaataaatacaaagggctctagaagctcaggggccttgctccctagaagcaaggagccccctgaccccttcttgaaaacatactctagtgtctttttctttattcccgtgttcgtcctctgttccattttccaggctccatgacaagtggcaccaacaacagggacttcaaggacgtgacgaagaaggtctgctagagcagaggaagtgaaatttaccagatgaaccgggaccccaggacgagtctgtcagcagggaatataaggccagtgctctaaagaagtactgaggatgggaagtctctgaatcagggtaacatggggtagaatttgtctgttgaagaaaaacattatgtgcagttgtttaaagttttattgaacacagtctggagctcaagttaattcacagacattaactaagcttctgcaggaggttattacacataacccatggtttctgcaggcaggcactctcaatgtggaaaattgggacagagtaggagacaaattgaaatgggctcatcaaaaaggtcccaaagtagacccttctgttttttcctcttggggttttgttcacacggtcctacagctgttgtctccttcttattctgtcacacaacaggagccaggttctgagtctcaagatttaaaaaaattatttgttcctccaactgggcctattgaaaacaatgagcaggagaaaggagaggagaattggccccttgctaagcaggaaacaggagaggagaattggccgctgccacaccctccaataacagaagtagaaacccccatacaaaaaattttgtgcactgctgctgtggctagggaacctttaggaacttgcacttttcctattaccataaggcctgacctgaatgatccgcaaaatcttttaaatgaacacactcctgtagagtttaaattactaaaagaattaaaagctagtgtggtcaataatggagtgcaggcccgggcacggtggctcacgcctgtaatcccagcactttgggaggctgaggcaggtggatcatgaggtcaggagattgagaccatgctggctaacatggtgaaactccatctctactaaaaatacaaaaaaaattagccaggtgtagtggtgggcccctgcagtcccagctactcaggaggctgaggcaggagaatggcataaacccaggaggtggagcttgcagtgagccaagatcacaccactgcactccattctgggtgacagagcaagactctgtctcaaaaaaaaaaaaattatcttgggctaccctctttgtgtcccctccctttgtatgggagctctgttttctttctttctttctttctttctttctttctttctttctttctttctttctttctttctttcttttttgagatgtagtttcactctttttgcccaggctggagtgcaatggcatgatcttggctcactgcaacctccacctcctgggttcaagggattctcctgcttcagcctcccgagtagctgggatgacaggcatgcaccaccatgtctgactaattttgcattttttagtagagacagggtttctccatgttggccaggctggtctcgaactccctacctcaggtgatccacctgctttggcctcccaaagtgctgggattacaggtgtgagccactgagcctggcctgggagctctgttttcactctattaaatcttacaactgcactctcttctggtctatgtttgttacagctcgagctgagcttttgattgctgtccaccactgctatttgccgccattgcagacctgccactgactttcatccctccagatccagcaaggtgtccactgtgctcctgatccagcaaggcacccattgctgctcctaatcaggctaaaggcttgccattgttcctgcatggctaagttcctgggttcattctaatcaagctgaacagtagtcactgggttccatggttctcttccatgacccatggcttccaatagaactataacactcacctcatggcccaagattccattccttggaatccgtgaagccaagaaccccaggtcagagaacataaggcttgctaccatcttggaagtggcctgctgccattttggaagtggcctgccaccatcttgggagctctgggagcaaggacccccccccccccggcaacattttggtgaccatgaagcgacctccaaagtggtgagtaacattggaccacttccgcttgctattctgtcctatccttccttagaattggaggaaaatactgggcacctgtcagctggttaaaaacaattagcgtggccaagggacttaagactcaggtgtgaggctgtctgggaagggctttctaacaacccccaacccttctgggttgggaatgttggcctgcctggaaccagcttccactttcaattttcttggggaagctgagggccaactagaggcagaaagctgtcatcccgaagtcctggcattagccagttgagattatggcacagccagaagtctctactcaacagtcacccatgtgtgtgcccccacctttccttctgacccataactcctgggtcctgagcatgactttcttgaaaatatagccccaaaattctccttacctctgaatctacttcctctgatctctgcctcctaggtactaatggttcagattttcatttcctctagcaagttgtatctccaaagggatctaaggaaactctatgctgcatccttaggtatctaggctataaacccagggagtcttgtccctggtgcccctcctgatttaggtatacagctttcaacatgggcagttatgtgggacctgttccctaccaccctggcaagggccccaactttgtaaatggctaagagaagagagacagagagagagagacacacacacagagagagagagagagacagagagagaaacagacagagaaagagagacagacagagaggagagaggaaagagaggcagagagacaaagagggagtcaaagagagaaagaaagagaaagatagaagtagaaaaaaaaagtgtgccctcttcctttaaaagccagggtaaattaaaaacctatagttgagaaatgaaggtcttatccatgaccctataacactccaatactaccctgttgtcactgtaaacaagggcgtagcctgaaaacactgagaccactgaccacccgtagccttcttatcaaaaatccttaacccagagaccgactgatggcccaagtgcattcaatctatagtggcaactgctttcgtagcagtagaaagtagaaaagtaacttttagaggaaaactcattgtgagcacacctcaccagttcagaattagtttaaggcaaacaagaaaaaagtagcttactaactcaaaaagtcttaaaatacggggttattctgttagaaaaaggtaatttaacactaaccactgataattcccttaacccagcagatttcctcacaggggatttaaatcttaattactatacaaaggtccaaccagacctaagaggaaatcccttcaggagaggatgatagatggttcctcccaggtgattgagaaaaaaataaaaaagggtattcagtaattgatacggaggctcctgtggaagcagagttggaaaaattgcctaataattggtctgctcaaatgcacgagctgtttgcactcagccaggccttaaagtacttacagaatcaaaaaagactatttcaatcctgactcaaagggctacctacaccctctctgaaatgaatttgcataagaacggttgtttatgggaatgcatcttgatggggcagctgggttgttatgaaatacttaggaacccagcccaggtctagtactcacccctgagcacaaaaacaatgttgggcaatttggtaaaggaccactagaatccagcagcctggacccctttctttgtggtcaagagaggtgggaaaagaggtgcaggactgctacatcagtgaacataactaatctgataagcagaggcctatgggtggttatgcaccctggaaaggaataagcattaagaacatagaggccgctctatgactaatgcttattggaaaatgaccaggggtgctggcatccctatgttcttttttcagatgggaaatgttccccccaaggcaaaaatgtccctaagatatattctggagaattggggccaattgaccctcagacactaagaaagaaatgacttatattcttctgcagtacaacctcaccatgatatcctcttcaaggggaaaaaacctggcctcctgagggaagtataaactataacaccatcttacagctagacctcttttgtaaaaaggaaggcaaatggagtgaagtgccatatgtgcaaactttcttttcattaagggacaacttgtgattatgtaaaaagtacaattatgtaaaaagccctacaggaagccctcagagtctatctccctaccccagtgtccccccgactccttccccaactaataaggacaccccttcaaccctaatggtccaaaaggagatatacaaaggggtaaacaatgagtcaaagagtgccaatattcccccattatgtccactccaagcagtgggaggaggagaatttggcccagccagtgtgtgtatacctttttctctctcagacttaaaacaagttaaaatagacctaggtaaattctcagataaccctgatggctatattgatgttttacaagggttaggacaagcctaacatctgacatggagagatataatgttactgctatatcagacactaaccacaaatgaaagaagtgccaccattactgcagcgtgagagcttggtgatctctggtatcttagtcaggtcaatgataggatgacaacagaggaaagagaatgattccccacaggccagcaggcagttcgcagtgcagaccctcattgggacatagaatcagaacatggagattggtgccacagacatttgctaacttgcatgctagaaggactaagaaaaactaggaaaaagcctatgaattattcaatgatgtccagtataacacagggaaaggaagaaaatcctactgcctttctggagagattaagggagacatggagaaagcatccctctctgtcacctgactctattgaaggccaactaatcttaaaggataagtttatcactcagtcagctgcagacattagaaaaaaacttcaaaagtccaccttgggcccgagcaaaacttagaaaccctattgaacttggcaacctcagttttttataatagagatcaggagagcagacagaatgggacaaacagaattacaaaaaaaaggccaccactttagtcatggccctcaagcaagcagactttggaggctctggaagagagaaaacctgggcaaatcaaatgcctaatagggcttgcttccagtgaggtctacaaggacactaaaaaagattatccaagtagaaataagccaacccctcatccatgccccttatgtcaagggaatcactggaaggccaactgccccaagggatgaaggtcctctgagtcagaagccactaaccagatgatccagcagcaggacggagtgttcctggggcaagtgccagcccatgccatcaccctcacagagccccaggtatgcttgaccattgagggccaggaggttaactgtctcctggacactggcacagccttctcagtcttactctcctgtcctggacaactgtcctccagatctgtcactatcagaggggtcctaggacagccagtcactagaaacttctcccagccactaagttgtgactggggaaatttactcttttcacatgcttttctaattatgcataaaagccccactcccttgttagggagagacattctagcaaaagcaagggcaattatacacctgaacataggagaaggaacacccatttgttgtcccctacttgaggaaggaataatcctgaagtctgggcaacagaaggacaatatggatgaacaaagaatgcccatcctgttcaagttaaactaaaggattccacctcttttccctaccaaaggcagtacccccttaaacccgaggcccaacaacaactccaaaagattgttaaggacctaaaagcccaaccatgcaatagcccctacaatactccaattttaggagtacagaaacccaacagacagtggaggttagtgcaagatcaacttcactccctagcagcagtagtccttcaaaatcaaagagctttagacttgctaaccaccgaaagagggggaatttgtttatttttaggggaacaatgctgttattatgttaatcaatccagaattgtcaccaagaaagttaaagaaatttgagatcaaatataatgtagagcagaggagcttcaaaacactggacctggggcctcctcagccaatggatgccctggattctccccttcttaggacctctagcagctataatattgttactcctctttggattctgtatctttaacctccttgttaagtttgtctcctccagaatcgaagctgtaaagctacaaatggttcttcaaatggagccccagatacagtccaaagttgatgacatcgaaggcactcctctcaaggaaatctcaactgcaagacccctactacaccccaattcagcaggaagcagttagagtggtcatcagccaatctccccaacagcacttgggttttcctgttgagagggggcactgagagacagaactagctggatttcctaggccaactaagaatccctaagcctagctgggaaggtgaccgcatccacctttaaacacagggcttgcaacttagctcacatctgaccaatcaggtagtaaagagagctcactaaaatgctaattaggcaaaaacaggaggtaaagacatagccaatcatctattgcttgagagcacagcgggagggacaatggtcaggatataaacccaggcattcgagctggtgactgctaccttctttgggtcctctccctttgtataggagctctgttttcactctattaaatcttgcaactgcaaaaaaaaaaaaaaaaaaaaagaaaaaaacaaaaacaaaacaaaaacagaaaaaaaaaattatctccaaaatatcatttactcccaaagaatgaactgcttcagttaagtcttcatctgttgtccaccatgttagatttccaacatataatgcaattctctttccagtatgtgtatagacaacattaggtgccactcctttacccatatcatcaccaacagttggtgggagagtatccatgtaatcccagtcttctgtggcatctccattatttgcagatggagatatgacacagtcatacaaatctatctggccatacccacgatattcagcttcctggtttaactcttcacccacatctcgtaaatgtctatgtggtccacgctgtctgccatcttccctcagcctcggccactgctgctgccgccaccaaataagtacatttttgatggtgacagagtaatatcaatgtctaaagttttggtctatctctcaaaattgagaagttgaccaaaagggagaaattgttaaattaattatgcctaaagctgccccctttcctgtttaactttggtcactaggttttttatacatagtaaactgaaatctaactgggtatataaatagaccaaccaattattgtacaaacctctgtgtttttgccaataaaagaacatcaagtgttcaaatcatgattaaataaggcaaatcccaacctgtaatcaatctggctgtttctgtatctcactttcattttctgtatgtcactttgcttttgctgtttataaatctattttcatcatgtggctgtgttagattctctctgagcctactctggatccacagcctacccaatttgcaaatcattccatgctcaattgatctctgttgctcacgtctgggagcactttggggggctgaggcaggtggatcacgaggtcaggaattcaagagcagcctgaccaacatggtggaaccctgtgtctactaaaactacaaaaatcagctgggtatggtggcgcatgcccataatccaggtactcaggaggctaaggcaagagaatcgcttgaactggggagacagaggttgccgtgagacaagatcacaccactgcactccagcctgggtgacaaagcaagactccatctttaaaaaaaaaaattaatgtatctaaaggttttttcttttaaaagatttcaaatattttctatgatgaaaactaataatgtgccattggactttgattttctaaactcatccctcagctatttctccaaattattttatgtctttacaaaatgcttctccagtttctttctttccttccttccctccttccctccctccctcccttctttctctctttctttcttttccttccttccttctttctttccttcttttgacagggactcactctgtcatccagtcttgattgcagtggtgtaactactcatagctcactgcagacttgaccttccaggtttaagctatcctcctgcctctgccacctaagtagctgggactataggcatgcaccaccatgggtggctaatttcttcatttttgtcatggaaacagaatcttactatgttgttcaggcagcactggaactcctgagctcacatcatctcccatctcatcctcccaaagtgctaaaaatacaggtgagagccaccatgtgcttctgcaatttttgtgaggattattcccaatgataaaaagtactctatgagcacaaatctaaaaggaatctgacttcttctgtagaagtgtcactctccaggatttcaagagtctagggcagggcagctactttagtagtgtgatctatggaggtgtatgggctttggagtcagataaagttgatcctgagtctcagcccagccacttagtagctgtaggtctgcacaagtttcttgatgtggaagagttctatataccacatatgtaaaaaaggtagaatattacaaattgtaaaatgattgcaaaatgacaacattttttcatcctacttgtatctatgcccatagccaggtgcttttacagctgtttccttaagatctggaatctgttttcaaaaccctatatctggctgcccttatttgctcaggtcagtagaaacctgtgaacatgacagtgggccagtttggggcccaggctcaaatggtattgactgcttctatttttcttttagaatgctgccatctccatgaataatgcccatgttagccagctggaaaataagataccatgaggaggagaagcaaggtgccgctgttgacaggcccagaagaagaaactcacccccagaagcagagctgtctagtcaacaagcagctgatgatacatgtctgaaggagctcagctgagactggaagaatggccccactcagctcggcctaaatggctgatcatttcaattatgaactaataagttttggatgatttgttatgctgcaatagctaactaatacatgcacccagtacagataggttgccaggattcagagacaggttgactaccagttggcttctaacagtggacaccctctaggtactgatttcttcccctgatttaaagtttgatgttttgtgagagaatttgggtaatgcagaaatacctgtagacatgtatgcatgtgattggtgcttagactcacatagtcccccacaccacaggagaaaacagataaatacagcctgaccattagggccaagaccaaatagcaaaatatgtttgcttttaatctattttctccatctctaaatactggagttcaagtgtgtggacagaactgaagacagctgtttttctcctgtagccccatcatcttttgttcactatctggtctctaaaagaaaggtgggcaacaggtgaccagcagttgcttattacctgtggctattttattcctactgcctatatgctcttaattttatactttattatctagaaaagtgtcatatgtatattggtgttgtgggccttatgctattctcttctctcagagttagagaatattttagagaatatttctgtgttaaaaattattggagaatttcagtcatttctattaatcagaaccaattctctttactctgtcattttattttaattcaaatgataaattctgctcatgaccatttggtaaatatatgtgtgtctgtgtgcttgcgtttttcaggagccattgtcatttagggatgtggccatagaattctctctggaggagtggcaatgcctggacagtgctcagcagggtttgtataggaaagtgatgttagagaactacagaaacctggtcttcttgggtgagaataactttaatacacaatttctaatataccctaaaggtttcctttctctttttttgtggaatgatttttggtaatttacgctttgcataaatgagtttctgatccattttttcaaaaaaatcttgagactttgtctgtgtggaaaagaaggtattcaagatgtctcatcttgacctgaactttccacattcctgagctggtctgtatccttcactctagattagtggtaattccagaaatgtagtggcataaaatattgttgcccatgtttttaggccaggcacggtggctcactcctgtaatcccagcactttgggaggccaaggtgggcagaccacgaggtcaggagtttgagaccagcctggccaacaaagtgaaaccttgtctctactaaaaatacaaaaattagccgggcatggtggcacatgcctgtagtcccagctactcatgagactgaggctggagaattcatttgaacccaggaggcagaggttgtagtgacccgagatcgtgccactgcactccagcctgggcaacagagcaaaactctgtcccactccgccccaaaaaaaaaagtatttatatatagttgcccgtattttaaaatctattcatcagcatcatgagtaccgggtagtgaaattaaggacctacaaatttaaaatattttctaaacatttagaaatttcattagtattttgagattaattttgggaatattctattacctcctctttactaagcatactactaggttggtaattggagaataagagaaagattcaagttattcatttctaataaagcaggtattgctgtcactaagccagacctggtcactgtctggagcaaggaaaagagcccgagaatataaagagacagatggtagccaaatccccaggtaggtgagagtgaacacaacagatgacacagatgagaggtccaaatgtcaaaaagaaagctggtccttaaaatgtgatttgggaagctgtgttccaaaggaaatagtttctgggatgtgtgagcttttttgttttttgggagtattttttgctgtgacataggggcatcttctctcttatgcttttaaattctttaaagattctgctttccctttggtgatcttccttcaagtgtacagtgagagccaaagtccttttcatggcatgtaaaagactgtacaatctccctgcttttccattatttggggggacacacagatatcagcataattttgggaaactctatgttaaactattttttagttttcctttttcatcatgtctgaaatgtgtgaaagtagaggtttctgttccattgttttgtttgttaatctttctgcacatttcatctgtttttaattactatattcttgaaatagagttaaattataaagtataatacccctctggtttgttcttttgcctcaagattgcttgggcttttcgaagtttattgcagtttcttgtaaattttagaattgtattttttattactgtgaaaaaaatgccactggaattttaataggaagttttttgaatctgtagattactttagataatatgacactttaacaatatttattctttcaatccatggacatgaaatattttaaaatttgtctcttcaataatttatttcattggtatcttacatcttttttgttttgttttgttttttgagaaggagtctcactcttttgccaggttggagtgcagtggtgcaatcttggctcactgcaacctctgcctcctgggttcaagcaatcttcctgcctcagcctcctgagtagctgggactacgggcgcatgtcaccacaccaagctaatgttttgtatttttagaagagacggagtttcaccatgttggccaggatggtcttgatctcttgaccttgtgatctgccccccttagcctcccaaagtgctgaaataacaagcataagccaccatgcctggcctatcttatatcttttattgtaaagattttttaccttcttggttaaatttgctctcagaaatttattattttaatgctattgtaaataagattattttctttattgtatcagatggtttaagtgtatggaacaataacttatacttgtatgttaattttatattttgctaatttactgagtgtatttattagtatagacaaatttcagtgcagtgtttatggtttttttatatataagatcatatgatccacaaacagtaactttttacttatttgtcttcaatttcagtggcttttcaaaaatgtttttgactcatgattctgccacttacttccagtcctacgtaaaaatagaagcattgacaataggcacaatatagttttgcattggtgtctgtgaatttgatagagcaaacacttcttcaagttgttttttttgttttgttttgtttttttgttttttttttgagacagcattttgctcttgttgcccaagctggagtgcagtgtcatgatcttggctcacagcaacctccgcctcccaggttcaagtgatgctctgtctccaaaaaaaaaaaaaaaaaggaaaattaatggttgtaaaaacacataacataaaatttaccatcttaaatcttttttttttcttttttgagacagaggctccctctgtcacccaggctggagtgcagtagcgcaatctcggctcactgcaacctcctcttcctgggttcaagcaattctcctgcctcagcctcctgagtagctgggattacaggcacccaccaccatgcctggctaattttttgtatttttaggagagacagggtttcaccatgttcgccaagctagtcttgaattcctgacctcaagtgatccttccaactcggcctcccaaagtgctggcattacagcatgggccaccgatcccagcctaccatcttaaatttctttaagtgtacatttcagggctagacctggtggtgcctcacaactgtaatcccaggatttcgggaggtcaagaaaggaggatcacttgagcccaaaagtttgaaatcagccagggtaatacagggagattccctctccacaaaattatttaaaaaattgccaggcatggtggtatgcacaagtggtttcagctacttgggaaatgaagagaagagaattacttgagcctgaaagtttgaggctgaagtgagccataattgtgccactgcactccagcttgggtgacagagtgataatgtctcaaaaaaaaaaaaaaaaagttttacagcccaggcacggtggctcattcctgtaatcccagcactttgggaggctgaggtgggcagaccacctgaggtcaggagttcaagaccagcctgaccaacatggtgaaaccccatctctactaaaaatacaagaattagctgggcctatgacaggtgcctgtaatcccagctactcgggaggctgaggcaggagaattgcttgaacccaggagccagaggttgcagtgagctgagattgccccattgcactccagcctgggtaagagtgaaacaccatctcaaaaaataataataataaaaataattgcattttagccatgttaagtatattcacattcttatgcaaaaaacttctagaaattttacatcttgtgaaactaaaactaaacacccattaagtaacaacaacccattttaccctctccccagcctttggcaaacacccttccactttctgttattctaaatgtgactatttaagatatctcatataagtagaatcatacagtgtccatcattttgtttctggcttatgtcaggcgatgtaatattctcaaagtttatcttaaaatgtgacaagattttcttctttaagactgaataggccaggtgtggtggctcacgcctgtaatcccagcagtttgggaggctgaggcgggcagatcatgagatcaggagatcgagaccatcctggctaacacggtgaaacccagtctctactaaaagtacaaaaaattagctgggcgaggtggctctcgcctgtagtcccagatactcgggaggctgaggcaggaaaatggcatgaaccaggggggcagagcctgcagtgagccgggatcgcaccactgcactccagcctgggtgacagagcgagactccttcttggaaaaaaaaaaaaagacctaataatattccattttatgtataggttacatttttgatgtgttcataaatctagagaaacccgggttgcctcagccttttgacttttgtgagtactggtacaataatcatagatgttcaaatatgtcttctaggtcttttgttgcatattttgaatatagattaatggaattgctgaatttaataataattatttttaattgagaaacgtaacattttaaaataatgactgcatctttgttttctaccaacaatcaacagaggtttcattttcattgcatcatcaacagatttggtgtctaaaaaatttatagcagccattgtaatggatgtgaggtgatttcatttttttcatttttatttttacatgtttctctacaaattgttaattttatgtgccatttcaaatggttttccccatttgtgtatcttttttttttttttgagacagagttttactcttatcacctgggctggagtacaatggcgcggcctcagctccctgaaacctccatctcccaggttcaaatgattctcctatctcagcctcctgagcagctggattacaggcatgagccaccacgcccatctaattttgtatttttagtcgagacagggtttcaccaccttggccaggctggtctcggactcctgacctcaggtgatccacccgccttggcctcccaaagtgctgggattacaggcatgaggccctgcacacgaccttgtgtatcttttagttcaattatttgttcatttctaaatcaagttattcaaatttattgttcagttttaagagttgtctctatattccattttttttttttttttttagatggagttttgctcttgttgcctagtctgagtgcaatggtgtgacctcagcttgatgcaacctccgcctccccattttaagtgattcacctgcctcggcctcccaagtatctgggattacaagcatgcgccaccatgcctagctaatattgtatttttagtcgaaatggggtttcaccacgttggtcaggctggtcttgaactcctgagctcagccttctccacctcggccttccaaagtgctgggattgaaccactgcacctggcccaaatattaactcttatcacatgtgacttgcaaatatttcccccatttcctatgaggcattttcattcaattgaatgtttttagtttctaatgtggagaaattttgaagtatagagtaaatctttctgtttttttgttgctgctcatgcatttaatgttgtatctaagaaaatggtgccaagacccatgtcatgacttttttctattttgttcaagagatttgttagttttttatgagtgtaagtattttattgaaaacattttttatatatggttcaaggaaattatccaactttatcagtgttgatatttggtttttaacattattgaaaagattatcttttctctattgtatgttcatggcagctttgtggaagatcatttaatcatatacacaagggttcatttctgaactctctattctgctctttcatctgtttatctgtctttgtatcagtaccatactgtttttgttattgtagcttttaatgttttaaaatcgggaagtataatgcctgtttgttcttttcatgggtgtttggttagttatagttcacaatcacatttaaaaattttaaagaatatttctgtaataactgctatttagatttttatagagatttcattgaatttgttcacctctgtaggttatattggcatcttaacaaaattaaaatttttgacccttgagcaggaatgtgttttattttaatttaatttaattttatttattagagacagtcttcctatggttccttggctagtttccagctcctgggctcaagcagttctcttgcctcagtcacccaaaatggtagtattacaggtgtgagccattgcactcggcccatgtgttttatttttagatattgttggattttccagctttacttttgcttttaattcctaggttttttttttttttttttttttttgagacagagttttgctcttgttgcccaggctggattgcaatggtgtggtctgcgctcaccacaacctctgcctcccaggttcaagcaattctcctgcctcagcttcccaagtagctgggattacaggcaagcaccataacgcccggctaattttgtatttttagtagagacacgatttctccatgttgaggctggtcttgaactcctgatctcaggtgatccgcctgcctcggcctcccgaagtgctgggattacagatgtgagccactgcgcccagcctttaattcctagttttattcagttttggtcagataccatgcagtgcatgattttggtcttcttaaatttatttgttgttgttttcagacaggatcatactccgtcacccaggctggagtatagtgtcataattttggctcactgcaacctcagcctccttgactcaagtgatctttacacctcagcctcctgagtagctgagactattgacatgcactgccatgcctggctaattttttgattatttctagggacagggtctcactatattactgacactggtcttatacttgtggtcccaagggatcctctcacttttgtcttccaaattgttgaaattatacatatcagccactacacccagctggtattctgtaataagacttgttatgtgttctaacagaatacatcaggtgcaaataagaatattgtgtattattttgcttttaactaaaaagttttgtacatgtctcttaagcctagtttgtctgtggtatggtttggatgtccatgttctgcaaacctcatgctgtaatgtaatcctcaatgttggatgtagaagctggtggggaggtgtttatatcatggggggcaaatttctcataaatgccttggcactattcttttgataatcagaaagtttacactccattaattcaaatgagagctgcttccttaaaagaacctggctttttctcttttttgtgatggagtttcactctgtactctaggctgcagtgcaatggcacaatcacagctcactgcaacctctgcctccctggttcaagtgattctcctgcctcagcctcccaagtagctgggattataggcactcatcaccatgcccagctaatttttgtagtttgttattagagatgggatttcaccatgttggtcaggctgatttcgaactcctgacttcatcgacttcccaaagttctgggattacaggtgtgagccacggtgcctggcctgaacctggctttttcacctcacacttgctctttttcttaccatgtcctgtttccattctctgcatatggctagccagttctcccagaaccatttgttaaatagggagttctttccttattgcttgtttttgtcaggtttttcaaagatcaggcagttgtagatatacagtcttatttctgagttctctattctgtttcatgggtctatgtgtctgtttttaccagtgccaggctgttttggttactacagccttgtagtatagtttgaagttggatagctgatgcctccagctttgttctttttgcctaagattgtcttggctatatggggcctttttgggttccatattaattttaaaatagttttctcattctccatcaatttttctttctttctttctttttttttgacatagtgtcactctatcacccaggctggactgcagtggcacaatctccgctcactgcaacctccacctcccaggtccaagtgattctcctgagtcagtttcctgagtagctgggatcacaggcttgcagcactacacctggctaatttttgtatttttagcagagatggggtttcaccatgttggttaggatggtcctaacctcagctaatctgccctcgttggcctcccaaagtgctggcattacaggcgagagccaatgtgcctggcctgcattgatgtttatcagagatgttggttttaaggttttgttgttgttgtttttatatctctgccaggttgggtatcagaatgatactgatcttataaaatgagttaaggaggagtttctccttttctttcatttaaatagtttcagaagaaatggtaccagcccttctttgtacctctggtagaattcagctgtaaatccgtctggttctgggcttttttttgtttggtagcctatttattactgtctcaatttcagaacctgttgttggtctattcagggattcaacttcttcctggttcagtcttgggagggtatatgtgtccagtaatttatccatttcttctagattttccagtttatgtgcatagaggtgtttatagtattttctgatgattgtatttttaattttttttttgacacaaagtctcactcttggcccccaggctggagtatgatggcacaatctcagttcactgcaacctctgcctcctgggttcaagtgattgtccttccttggccccccgagtagctgggattacaggtgcctgccaccacacccggcaaattttttttttttttttgtatttttagtggaggcggggtttcactttgttggccaggctggtctagaactcctgacctcaggtgatccacccacctcggcctcccaaagtgctgggattacaggcatgatccaccacacccagccctgatgattgtatttctataaggtcagtgctgatacctgctttatcgttttttactgtgtctatttctttcttctcttttctttattaatctagctagtggtctattttattttattttttaaacagctcctggattcattgatttttttgaaaggtttttttgtgtctctgtctcctatggttccactctgatcctggttattttttgtcttctgctggctttggggtttgtttgctcttggttctctttttcttttagttgtgatgttagggtgtcaatttgaggtctttctagctttttgatgtgggtatttagtgctattttaccccccttaacactgctttagctgcattccagagaatttggtttcaaataattttttgatttctgacaattatttactcagaagttattcaggagtatgttttccatgcaattgtgtagttttgagttagtttccatgcagtcgtatggttttgagtgagtttctttctcttgagttctaatttgattgcactgtggtctgagaaactgttatgatttcagttctttggaatctgctaaggagtgttttacttccaattatataatcaattttagagtaagtgcaatgtggcaattagaagaatgtgtattgtgttgtttttggctggtgagttctgtaaatatctatcaggtccacttgacctacagctgagttaagtcctgaatatccttgttatttttctttcccaatgatctgtctaatattggcagtggggtgttaaagtttcccactgtcattgtttgggagtctaagtctcttcgtaggtatctatgttttataaatctgggtgctggctgggtgtggtggctcatacctgtaatgtcagcactttgggaggccaaggcaggcagatgccctgaggtcaggagtttgagaccagcctagccaacatggtgaaatgctgtctctattaaaaatacaaaaattagctgggcatagtcatgggcacctgtaatcccagctattcaggaagctgaggcaggagaattgcttgaacctgcgaagtggagtttgcagtgagccaagattgtgccattgacctctagtgtgggtgacagagtgaaattccatctcaaaaaataaatcaataaatgaaaacaaatcttagtgctccttgaattgatccctttaccattatgtagtgtccttccttgtcttttttgatctttattggtttaaagtctgttttgtcagaaactactattgcaacccctgcttttttctgcttttatttgctttgtaaattgttctccctttctttattttgaggctatgggtgtctttgcatgtgagatgggtctcttgaatacagcacaccagtgggtcttgactctaaccagcttgccattctgtgtcttttaattggggcatttagcccatttaaatttaaggttaatattgttatgtgtgaatttgatcctgttctcatggtgctagctggttattttgcagacttgttgatgtagttgtttcatgatgtcattggtctttgtacttcagtgtgttttgcatttgctggtagtggtttcttcttttcatatttagtgcttctttcaggagctcttgcaaggcaggtctagtggtgatgaattccttcagcatttgtttgtctgaaaatgatttcatttctccttcacttatgaagcttacttttactgggtattctgggttagaaattcattcttttaagaatgctgaatattggcccccaattgacaccctggcttgtagggtgtcttcttagaggtccattttatagtaggtgacctggccttccctttggctgctcttaccattttttcctgaagtctaaccttgaagaatctgataattatgtgtcttgaggttgatcttctcatggagtatcttactggggttctctggattttctgaatttgaatgttggcctgtctttttaggttggaaaagttcttctggatgatatcctgaagtatgttttccaacttggttacattctttccatctctttagagtactgcaatcagttgtaagtggtctttttacataatccaacagttctcagagattttttcattcctttttatttttattttttcaatcttatctgccttatttcagcaagatagccttcaagctctgaaattcttctccctgcttgatctactcagttattgatacttgtgattacattgtgaagttctcatgttgtgttattcagttgcatcaggtcatttatgttcctctctaaactggttattcgggttaacagctcctgtaatgtttttcgtggttcttagcttctttgcattggcttagaacatgcttcattacctcaccgaagctgattattacccaccttctgaagcctacttctctcaatttatccatctcagcctgatcccagttctgtcctcttgctggagacatgttttgattatttggaggagtagagacactctggctttttgagttttgaacatttttttattgattattctcatcatcatgagtttatctagctttggtctttgaggctgctgacgtttggatggggtttttgtggggacatttttgttgatgctgctgtggttgctttctgtttttcttttaacagtcaggcccctcttctgtagggccgctgtgatttgcttgggatccacttcagatcctatttgcctgggtttctcccacacctggaggtgtcaccagtggagtgtgtagaacagcagagagaactgcctgctccttcatctgtaagctttttcccagatgggcactgagctgatgacagtgggaatacttctttataagttgtcttacaatgcctgttgggggggtggtcctcactcagtcaggatgcacaggattcaggaaccacttaacaaggcactctggctgcttcttggtgaagggggtgtgcttcactgggagaaattccatacatctggactgcccagatttttcagagccagcagggggaaagactaagtctgctgatctgcagaaaccacttcattgttacacttttatgtgtttcttgtagatatgtcttttctcatttcttgttttactgccttaatttttgttttaattttattgtgacatgctttattttttattttgttttgcatactttccataagtataatgtaatcttgaaatacaatgtaaccatattgaagaacagattacataaaacatcttaaagttaaaactatgtattttaatctcatcacacttcaattaaatacaaaacttatactgttatattttccagtttgttattaatattaaaaaccatattatcttacatcatgtatctattaacagatttatacagatttatatcttgttttttatatctgtagaagaactttaagggttttatgcagcatcattttgatagtaaaaaattctatatgtgtctgtatttacatttaatagagaacttcatatttatatatgttttatgatgctgtctagtatcattttgtttttcaacataatggactcattttagcatttctttttgtttgtatgcagagtctcactatgtttctctggctgatcttgaactactggtctcaagtgatctatctaccttgtcttcctaaagctgtagaattacaggcctgagccactgtgcctggctaccatttaacattttatgtaggactctggtagttgtaataaatgccctgaacttttattttggaaagtctttatttttatcttgtttttgaagtaaaataattttgaattaagtattagttagaaattcttttataacatcaaaatttgggaagttctcagtcttttttgtcttcaaataagctctgtattactttttccctatattcttctaagattcctttcatgaatatattgatctacttgatggtgtccaatacattttacattccatattttaattttgttttgcaatgttatatttttgtgttatatattttaaggtatgccacttcacaccatttacttgtgttttggtgttttattttatattataattgtgtatgacagtgtttaactctgtgcaatttaagacagtctagcaaaatcaatataaatcagccagaagtctactgccaatataattacctctgtgtttgtttacctctataaatgtcatctctgtttattttatcacttgtatatttgttttgtaggtttgttttgaatggtcgtttagtcttggctaggtgaccagttataaaattctcctaatttcagtatctgttgtgaatctacattacttctgtgtgggagaaatactttgggatttgaagataaaattgaaactattatatctttatatattgttcatttttacttgtcaaaaacacataaaatattatctttttttttttcttgagacagcatctctgttgcccaggctggggtgcagttgtggcatcttggctcactgcaacctccgtctcctgggttcaagcgattcttttgcctcagcctcctgagtagctgggattacaggcatgcgacaccacaccctgctaatttttgtattgttagtagagatggggtttcaccgtgttggccaggctggtatccaactcctgacctcgtgatccacccacctggcctcccaaagtgctgggattacaggtgtgagtcatcacacctggcccattatcaaatatttttaaataatctgtttagtcatattaattatagtgataatattacgcaacatacacctagaatgtttttatcttgcaaatctaaatctcagtgtacattaaacaacaaccaatttttctgattttctggcactttgcaaacaccactttgttttctttttctaagagtgtaactgcctcatatgtcttatacaatctctgtctcattgtggctagctcattttattttgcataatgtcatcaagctttatttttagagttgttagactatttcctgctttttaaatcctgggtgatattccagtatttttatgtcacaaattatatgtattggataatttggtgacagaaagttgcattgctgccgggcgcagtggctcacatctgtaatcccagcactttgagaggctgaggcaggaagataacaagtcaatagatcgagaccatccaggccaacatggtgaaaccccgtctctactaaaaatacaaaaaattagctgggcatggtggcacacacctgttttcccagctacttgggaggctgaggcaggagaattgcttgaacctgggaggtggaggttgcagtgagccaagtgtcactgcactccagcctgtgcaacagtgcaagactcagtctcaaaacaaacaaacaaacaaaaacaatagaaagaaatttgcattgcttttacttattggctttcagtaaaaatgctgcaataattatgggtatgaaaataactcttcatatgaccatatatgtgaaactttatataggtgctgcattctattttattagcctactttttacccattatactcataccaaattgttttaattctgtagctttgtaatgtgttttgaaatcaggaactataatgccttcattttctttttttgaagactcttgggtactttattgtctcttgacattttatatatttttggagttgtttctatttcctcaaaaatgcaatgagaaattttttaaaacattgcattaaatctgtagattacattgagaagtatggatgttttcaaaatatcaattatttctacctttaaacaggagcatgctcaagagtgtgttgtttaatttccatgtatttgtgaatttttagttctttttctattattgttttatactcattccattttgttcatataatccatacaatttcagtcttagcaaatgcattaagacttcctttttggcctaacatatggtctaccaaggagaatgttgtatgagcaattgagaagcatgtgtatcctgatattgttgaggagtcttctctatatatctgttagaaataattgttttatactgccttcaagtcctctcttcactaacaaatattctgttttgttttatttttattatggaaagtagggtatggaaatgtcctactataattatattgctgtctaggtgtttcttccattctgtcaatgtttgctttatatatttggaaacttaatgtgagatacacacacacacacacacacacatacatttgacttaggttatcagtaaatgaatctattattttttaatgtcttttgtctctttgcaattttgacttttagtacattttataaaatatgaaagtttttcacttaagatatagcttatgtcatattattttgacctcttctctcatttggttaatatttacttgcaatatgtatatccatcttgccactttcagttttttttatcagtagatctcagcttactcttgtagaaaggcaaattggatctcagtttttaaaatatttaaataaatctctttattaaaagtatgtttcttgattgcaaagttaaagatatatatttaaataattttctgaaacaggaagacatactaatgttattttattgttttatttgattcttatatcttggtcactcattttctctttgtctttgtgtctttttagttttatattgatatgtttcttttacttatttcttaatttgttttgtgcatctatacacatatgttctttgaggtaccttggggattacataaacctctaaaagataaaacagtatatttcaatctggtaaaaaggaacttcatttgcatgcacaatttttttctcattacatcttccctcaaatttgtcattgattttgctaattatatctttttatgttgtatatttattaacagatgtttataatgatttctgtgattttctctttcaactttcagataataattaaaaatgttttctgcaccattattataatgcaaagaaattccattttggtgtatgtgcatatacttagaagtaaaaatatatatgtgcatataatctttcccagaaaataaatgtagttttatatgattatgtgttgcttttgttgaattatgttattttcagaagaagcaactgctttcagcactttttatatgtagggtttatggagttccaatatacttttcagaattttgttatttttgaaagtttttttctttttatttggcaggacagatttgctgatggtattatgctgtcttgatcgctgtatttttcaggagtttgactttatcacacatttcccttctggtctgcaaaatttttgttgacaattcactggctgtctcataagactatgcttgcaaatgacgcatcacttttatcttgcagctcccaaggttctcttcttgtctgtgacttttgaaattgtgcttatatatgtgtttgttataaatatctttgtgtgtttcctagtttgtttgttgagcttcaacatattgccttattttgtatacattgtaacccttgattgaaatttggacattaaaaaaggctacctgtcacaatctttataatgtagctttgtcctggcatagtctgaacaatcgtcttggttagagattctgggagtctctcaaacatgttcttagaatgtgtcttgtctgaaatgttctttattttttagttaaaggaatttattcatgtttcttcttaatagtagtcacgtgctacacctgttttctctgtgtggtacagtagtctctctggtgctgtaacatttacctttggtctcagcaaacttaaactgtcactccaaagtataccaccatttctttcagcattatatttcaagagagacacaaaccagttttggaaagctcctagaagcaagtaacaaagatgaatgtgccagtattttacttgtcgttaaaacgttggcaatttacttctaaagacactatgttatattggggagcagaaagagctgtgttgggtaaatatagcagactttcacttccaggtggctctttgcgttgttctcaccatgggcacttcatacacttagctcatttgtaaatttttttcagatgtaatttggttggtatgtttttgttacatttacatgtctaaaggaatgagggcctttggtattttcctatgccatcttgtttatgtagtttgtataataagttagatttgaaaactttgtctgtgtctagcaagtaatttgttatttttatttctttcagttatatgttctcattttgcccaagacctttgggcagagcaggacatgaaagattcttttcaagaagcgattctgaaaaaatatggaaaatgtggacatgacaatttacagttacaaaaaggctataaaagtgtggatgagtgtaaggtacacaaagaagataacaaactaaacctgtgtttgataactaccaagagcaatatatttcaatgtgatccatatgaaaaagtctttcatacattttcaaattgaaatagacataagataagacatactagaaagaaacctttcaaatgtaaaaaatgtgaaaaatcattttgcatgcttttacacctaactcaacataaaagatttcatattacagagaattcctaccaatgtgaagattgtggcaaaaccttcaactgcttctcaattcttactgaacacaggagaattcatactggagagaaatcctacaaatgtgaagaatgtgagaaagaatttaaacggtcctcacaccttactacacataagataattcatactggagagaaaccgtacagatgtgaagaatgtgggaaagcctttaaccggtgttcacacctcactacacatagaagaattcatattggagagaaaccctacaaatgtgaagaatgtggcaaagcttttcaccaatcctcaaccctaactgcccataagataactcatgctggagaggagccctacaaatgtgaagaatgtggcaaagcttttgcaagattctcataccttaagaaccataagataagtcatactggagataaattctacaaatgtgaagaatgtggcaaagtctttaaccactcctcaactcctactacacataagagaattcatactggagagaaaccatacaaatgtgaaaaatgtggcaaagcctttaactagtcctcaactcttactaaacataaaaaaattcatgctagagagaacccctgttagtgtgaagaatatggcaaagcctttaataagttctcaattcttaacagatataagataattcatactagagataaattctataaaccagaaagatgtgacagtgcttttgaaaacacctcaaacttttctaaacataaaagaaatcatagtgttgagaaatcctagaaatgtgaagaatgtgataaagttttaagtggttgtcacacttgattgtaggtaagataagttatactggagaaaacttctacatgtgtgaacagtgtgacaaaacttttaaccagtgctcacaccttacttcacaggaaagcatttatacttgagaaatattgtataaatataaagactgtgaaaaagccattaatacatgctcacatcttactcaacatcagagagttcatacttaataaaaacattataagtgcaactactgtcaaaatatctttaagaaaatggaagcctctaaagtaaagaagattattttgaagaagaacattgtagtagggttgtaatatgtttacttgtgtcacagatcttattgtacacattttgtattagaggaaacctcagaagcaattgctcaaactttgtttaatatcagggaatttatattgaaaaaaaaaccctgcaaatgtaataaatttggaaaaatactttttcaaaaactacagcttagaaaacaccacagagttcatactaaaacatatttttgcagatgcagtaaaaatttaaagaaattttaatacaaaattaagtctatgtaaatatcagagaatttacagtagaaatatataaggcactgacacttcagatattatactaaatcacagtgctcatgatagaaaataatctaaaactaaagttgatagaaaaattattcatatataagtttaaaagaattttttgcagaattataattacattcaaagtatgcttaacttttggaaaacatagattttttgaaaagtgaataatgatgtaattcaattctcaaattatttcctgctgtttcttcattcctatttacatgtgagagcatgtgatgaattgttgctgcatccaagatatgagagattcttttttattaggtgagcattatttataaactttgttatgaaaatgtaaggacattaaaatgtaagatgcatgatgaaaatctaagtgaagagacctttgtggttaacttataatattgagtaatgtgtgagttaagtgttcagtcatattcttctgtattatgagaagaaaacatttttaatttcataagtaaattaaaatttagtatattgtactaattatacttttatataaaatgcagtatattttgaaaatttcagattatatgtgatgttaatatattcaacatctttaacattttaaatactgttgtgcattcagtgaagtgttatgtaacaaacattaattcccccttactcaaggttgtacataaaatatggtaataatatactatttgttaacataatggattaacttctctagtacttttgccagtggctttgactgcaaataagttaaacaatattatttctttaaattaaatttttgtttctattttatttaattttttttgagagggagtcttgctctgtcacccagtctggagtgcagtggcacaatctcagctcactgcaaccttgcctcctgggttcaagcaattcttctgcctcgatctcccaagtagctgggattacaggcacccgccaccacacccagctaatttttgtattttagtagagacagggtttcactatgcaggtcaagctggtctcaaactcctgacctcaaatgatccacacgtctcggcctcccaaagtgctgggattacaggtgtgagtcaccatgcccagccaaatttttattttatttaaatttatttttcttaattatttggggtacataatatgagtatatattcatgcaatatatggcatattttgatacaagaatacactatataataatcacaccagggtaaatgaggtatccatcacctctagtatttatcttttttttgttgttgagacagagtcttgctgtgctgcccaggctagagggtagtggtgcaagcttggctcactgcaacctccacctcctgggttcaaatgattcttctgcctcagcctcctgagtagctgggtttacaggcatgcaccaccatgcccagctaatttttgtgtttttagtagagacagggtttcaccttgttggtcaggctggtctcaaactcctgaactcatgatctgcctgccttggcctcccaaagtgctgggattacaggtgtgagccaccgtgcccggcttagcatttatcctttgtataacaaacaatccaattgtatgcttttagttatttaaagatgtacatttaaattgttattgattacagtgtaatttttatggtcaaaataaaagttatgtagaaatatgaataaaatccatacatttctgagtcctgaataaatatttttaaagttttctgatatttattttttgaacatgtttcctgtctgcccacaaacacatgcagacgtttagttttgatttacatagagttcaatatatgttagtctaaagataaaccttaggtgtaagaaaattatagagtaagtgagtttgtgtaagtatgaatttgtaactattttcagaagaagacaatattgaacaaggcaaatcatttcaacaagatgactactagaaaactaaaaaccttaaaaatgctgaaagcaagtatattctctgctttgtattgaatttattactgtacaatcgatggcttttggttctgaatctccccatgcaaattttgtttatacttgtctggtactcatgatagacccctaattactttgtatcttttcgatatatatattttatagtttatgaagtattcattatgtgagcttgtctgtgtttataagaataattttataaaatttagtagtgcatacaaaaattttaaatgtaattccataattagtgtattaagttacattttatttagttagaacactccattttgtttttaattggagaactctatagccctttagttatttttcttttcactttttataattggcataagtaaatttatttattgagttaatttgttcagataagtactagggaagctttataagtcatgaggatgtttttatatttaaatgtagcaggccgggcgcagtggctcacaccggtaatcccagcactttgggaggccgaggctggcggatcatgaggtcaggagatcgagaccatcctggctaacacggtgaaaccccgtctctgctaaaaaatagaaaaactttgcagggcgtggtggcggacgcctgtagtcccagctactggggaggctgaggcaagagaatggcgtgaacccaggaggcggagcttgcagtgaggtgaggtcgcgccactgcactccagcctggacgacagagcgagagtccggctcaaaaaaaaataaaaaataaaaataaatgtagcaaacatacatgacagttcttgccttgtaacagatgctccgaagtaagccataagtattcctgctaaagttagtttgtaacttcaagttagagatggaaaacatcagtggtgaagaattcagattgattcttcatgtggagaggacatattttccaggctgcaatgctgaatcttgctgaatttaaagagaagttctgcatcttttatttcttaattatcttcagatttgtctgtatttattatgtgtatcccagctatgtatgcagcacagcccttctcctttttctgtgttacggcttcagttttctcagtgttgtcttaatgccgtttcatttcacatggtactttgtaaattttgatgagaaagttcgcctttttttttttttttttttttgcgtcagagtctcgctctgtcgccaaggctggagtgcagtggcataatgtcggctcactgcaacctccgctttctaggttcaagcaattatcctgcctcagcctcccaagtagctgggattacaggcgcctgccaccacacctggctgatttttttttttttttttttttgtagttttagtagagactgggtttcaccatgttggccaggctggttttacacatcaggatcacctgatgtgatccacctgcctcggcctcccaaagtgctggaattacaggcgtgagcccctgcacccggctgaaagttggtattttttaatgcactgaaaaattggttttaactgaagagtttggttatcaatataactttcagatcagttaagataaataaaaacatacactgtccacgggtgagaggattaaatcagcatggtttttctttgtaaaaccaaaaaaaaaaaaaaattggattcttacacaaactgtggcaaatataaaatttgcttcaaaacatagaaattttaaaaagagttatggtaagtgaacatggtggcacctgcgccaccatgctcagctaattttttattttttttttagtagagacgagttttcaccatgttggccaggctggtcttgaactcctgacctcaggtgatctgcccacctcagcctccccaattgataggattataggtgggagccaccgcacctggcagagtttcttacatatttttgatattaactccttgtcacatgtataatttgcaaatattttctctcattttttagttgtctcgtcctgttgattgtatcatattctgtgcagcagctttttaatttgaagtcatctgactcatctatttttccttttatttcctaagattttgaggttaaattttaaaaaactggccaggcacggtggttcacgtctgtaattccagcactttgagaggctgaggcaggcggatcacctaatgtcaggagtttgagaccagcctggccaacatggtgaaacctcgtctctactaaaaatacaaaaattagccaggcgctgtggcgggtgcctgtaatcccagctactcgggaggctgaggcagaagaatcacttgaactcgggaggcggaggttgcagtgagccgagatcatgccactgcaccccagcctggtcgacagtgagactccgtctcaaaacaaaacaaaaaaccaacttactaatgccctgaacaaatttttttttagatggctccttttttttttattatactttaagttttagggtacatgtgcacattgtgcaggttagttacatatgtatacatgtgccatgctggtgcgctgcacccactaactcgtcatctagcattaggtatatctcccaatgctatccctcccccctccccccaccccacaacagtccccagagtgtgatattccccttcctgtgtccatatgatctcattgttcaattcccatctatgagtgagaatatgcggtgtttggttttttgttcttgcgatagtttactgagaatgatgatttccaatttcatccatgtccctacaaaggacatgaactcatattttttatggctgcatagtattccatggtgtatatgtgccacattttcttaatccagtctatcattgttggacatttgggttggttccaagtctttgctatcgtgaataatgccgcaataaacatacgtgtgcatgtgtctttatatcagcatgatttatagttctttgggtacatacccagtatccctgaacaattttatggggttttcattctatttttctgtagtagtttcagagtttcaggtcttacatttatttattattattactattttgagatggagtctcactcttgttgcccaggctggagtgcaatggcacgcgatctcaactcactgcaaccttagcctcctgggttcaagtgattcttctgcctcagcctctctcccaagtaggtggtattacaggcacatgcaaccattttgtatttttagtaggaaattttgtatttttctacaccagctagttttgtatttttagtagaaacagggtttcactaccttggccaggctggtcgcaaacaactgacctcaggtaatctgcccgcctccacctcccaaaatgctgggattacaggcgtgagccaccaggttcatcctaagccttacatttaagtgtctaatttacttttagttgatttttatatatggtgtgagatgagggtctcattttatttctctgcctgtggatataaagttatctcaacaccatttattgaagatactgttcttttggctcacgcctgtaatcccagcactttggcaggacaaggcgggtggatcaggaggtcaggagatcaagaccatcctggccaacatggtgaaacctgtctctactaaaatacaaaaaattatccaggtgtgggcgcctgtagtcctagctactaaggaggctgaggcaggggaatcacttgaacctgggaggtgggggttgcagtggcaagattgtgccactgcactccagcctggcgacagaacaagactccatcttaaaaaaagaaaaaaaaaaaagaaaagaaaagaaattgtcatctttattccaaatcagttagctttaaatacatggatatatttctggtctcttttttactgctccattggcctatgtgtctgtttttattcaagtaccgtactgctttagttactatagcactgtagaatatttgaaaggtatggtaataccttcatgtttttttcttgattgctttggctattcagggtctttcgtggtaccatatacattttctatgatgtatgccactggtattttgatagaggttgcattatacctgtagatcattttgtgtaatacagaaatttattaatggaattcaataaatgagtaatatttcatttgtgcattacttaatttattcaatgttatttacagtgtaatgtaaggtgtttcaactttttggttaagtttatttcaaagtatactacagttattgagatggaattattttttaatttcattttgagatagttgttagtgtacataaatgctactgacttttggatgttgcttttgtattctgaaagcttaataaatgtgtttattctaatattttatagtaaattcttaggcttttctgtatttcaggttatgtacagcaataaaagataattatacagggataatgtaatttcttcctaacctagatgcctttgattttattctctaatttctttgtcatggactttcagaactatgtttagtaagactgattagaatggacatctttgtcttgttttagcttttagagtaaaagcttataatatttcactgtttagtatgttgttagctgtgcatttttttgttatatgtggcatttattgactgaggtgcatttgttctatacctaattttttcagagatttatcataagggaatgtcaacttttgtcaaacttttattctgcttctgttcttttctttttgttctctgcatctatttaaatattagggatgtgaaatcacaactaatcctacataaatacaaaaaatcatgagagactactatgaacccctctatgccggcaaactagaaaatttggaaaaaatatgctgggcaaggtggctcacacctgtaatccaagcactttgggaggctgagatgggcagatcacctgaggtcaggagttcgagaccagcctggccaatatggtgaaaactcatctctactaaaagtacaaaaaataaaaataaaaaaaattaaccagaaatgttgtcacacacctgtaatcccagctactcaggagactgaggcaggagaatcacttgaactcaggaggcagaaattgcagtgagagtgagcttagatcgcaccactgcactccagcctgggtgacagggtgagactctgtctcaaaaaaataaaaaaaaattggagaaaataaataaactcctcgatacaaacagctttccaagactgaaccagaaataaacagatctcgaacagagcaaaagtgtataaaatatataatgaaactgaattagtaataaactaccaaccataaaagccctggatcatatgaaatcacatccaaattttaccccacatacaaagacattctgctgaatgtactccaaaaaatcaaggtaagattccaccctaactcactatataaaatcagtactatctagtgaacaaaatctagtgaaggcacaactaaaaaagaaaactccaggccgatatttttcataaacattaaaacaaaaatcctgcatgaaatactggcaagctgagttcataagcaaatgagaaagttattttgccacaaccgtgtgatttttattccacatatgcaaggatgtttcatcatatgcaagttataagtgcgattcaccatgtaaaaataattaaaagccaaaaattataagattaacacaatagatgcagaaaaagcattgaagaaaatccaatattcattcatgaaaatattctcaacaaacaaggcattgatgaaacatacctcaaagtgataagagccatctatgacaaatcctcagccaacattatactgaaaaggcaatagctgcatgcattctccattagaataaaaataagacaagaatacccactctaacactcctattcaacataattctagaagtcttagtcagagcaatccaacaaactaaagaaataaaaagcatctaaacagaaaaaaaggaagttaaattatcttacactgatgatataatgctctacctagaaaactttacagatttctggaagtatataattttaaaatataaattatggctgttaaatatcttcatttctatacctcttttggctaatattaaggttgattgaaaatataagttgttagaaaatttcttgaattaaggccattagttaattattaacataatttgagacataatagcaatgaaaatcagcattgattaatgaaacaaatattatctagcccctggtaatcattttctctcccacccaatgtgaaagcactatctttgtgtcatctctcccagttctaagaaagaggcttctgatcaaattgatcagcatacaaatttgtaaagtttaacttttagtctaaaaatttattatcagcaaagtttatcttttgatatgtaatattttattctatttaaattcttcagaaaagtgaaactgacacagcttgcatttaactttttttgtaagttaaaaatgcttaagaaactttttttatagaaactaaaacaaaataattttacatttttggagaacatttctcaagtacttcaagttatctttctctgacagtagatatatatttttctctattgctgtaatagagctttgactgtcctttgtggccgactctgtcatttttattctattttgttgtgtggtgtttatgttatgcatcttacattgtaaaagttgtagtccatgcaggcaatgtaataatttttttttttttttttgagatggagtcctgctctgtcacccaagatagaccgcggtggtgcaatcttggctcacggcaacctctgcctcccaggttcaagtgattctcctgcctcagcctcctgagtagctgggattacatgtgcatgccatcatgcctaatttttgtacttttagtagagacggggtttcactatgttggtcaggctggtctcgaactcctgatctcatgatctgcctgcttctgcctcccaaagtgctgagatttcaggtgtgagcccccacgccccacctgttttgtttttgagatgaagtcttgatctgtttcccaggctggggtgcagtgatgcaatctcagctcatggcagcttctgccactcgggttcaagtgattctcctgcctcagcctcctgagtagctgggattacaggttcccaccaccacacccagctaatttttgtatttttagtagagacagggttttgccatgttagccaggctggtcttgaactcttgaccttaggtgatgtgcctgccttgacctcacaaagtgctgggattacaagcttgagccgccacacccagcagcaatgtaattttcaaacaattgaccagcctttttccatgtcaaactctctgcttaatcagtcctttattttcactcttcaaaggcattttaactgtgtttttttgttttgttttgtttttgatggactttcattcttattgcccaggctgaagtgcaatggcatgatctcagctcaccacgactgctgcttcctgagttcaagcaattttcctgcctcagcctcctaagtagctgggactgcaggcaggtgccaccacatctggctagttttgtatttttagtagagatggggtttctccatgttggtcaggctggtctcgaactcccaacctcagatgatctgcccaccttggcctcccaaagtgcggggattacaggcatgagctaccgtgcctggccatatacatgcttttatgacaaatcattttgtgatcatttaaagttttaatttagcagttgccaagaccagctcagctggggagaccctaacccagtggcactagaggaattaaagacactcacagaaatatagaggtgtgaagtgggaaatcaggggtctcacagccttcagagctgagagccctgaacagagatttacccagatatttattaacagcaaaccagtcattagcattgtttctatagacattaaattaactaaaagtatcccttatgggaaatgaagggatgggctgaattaaaggaatatgttgggctagttaactgcagcaggagcatgtccttaaggcctaaatcgctcatgctattgtttatggcttaagaatgcccttaagtggttttctgccctgagcaggccaggtgttccttgccctcattcccataagcccacaaccttccagcgcgggcgttagggccattatgaacatgttacagtgctgcagagattttgtttatggccagtcttggggccagtttatagccagattttagggggcttgctcccaacatgcccccttctctgatttgcaaatcaataaaaacaagggcagctttctcacagtgagctacttctcacaggagtcgggatctacatctgcagactatacaaaggcaaacaacacagattaaaactacagccatcattgaaatcagagagcttccaagtgtttttatccattttaatgggttactagctgctaatttgtctgcacctcctttaaacactccagttcctggcattaaggtcaggtgtgcctgggatgctttaaatatttgttcttttaattttaaatccttatgttaagctcctagagcaggccatatcatttgaggttgaggtgccactataccgtcatggttccagataataggaacttttgccatacttattattatatctaccatctgaccattttgttcagatcacctgaacatagtgtgaccgtggcatgcagactgagaggtgcaattcaagctaaacatccccttaggggatcaattaataatgattccataggaaacattctgcagcacctctgcctgttctgcaaagcaatcttcctaaataagtacgttcattttttctactgggtccaatcctgtttacaaataggtttttgagggcagtatgcctcaattataggagcagatttattatggtaaatacggagatcagaaagcatgtgtaactgtgtcatagagtgattgcatccaggcattattaccagcccttattgaaggaatactcacagcaatggtgataaccactatcatagctaccattaagttattcattgtgactgattgtcctgctttcctcaggttttcttccaccatctgtgacagcttcttgatctgtccccaggtgggtggctgtgtttgacgggtgttgcttgtgacagttggggtcctcctcagtgtcagcctggacatggctgcaactggcgggtcctcaggatcctcccagaatctcttcctcagcatctggctcatgataaggtttcaggtgtcttgatggtatccaaatcagttgttgattttggcctggagaaatacaagtataacctctaccccaagttattattttacctatttcccaactttttgtagtcggatctctccaccaaatcagatgttctgttcctgtctttgcagctggtttctgtagatgctggtcagctgctgataacatctggcctttgggaaggttcaaaaaatttaaagttaataatgctagattcagttgtatctgcagtgttccatattctctatttttccctttctacttttgtgactgctgttttagggaaagattcattctttccactatggcttgtccttgagaattgtatgggatgacagtaatgtgattaatattccacatagagaaaaatgtagctagagtttggctagtatagcctggggcattatctgttttaatagaagctggaatgcccatcactgtgaaacactgcaaaagatgacatttaacacaagcagaaaactctcctgtttggcatgtagcccagacaaagtgagaaaatgtgtccacacatacatgtacataagctagtctcccaaacgagggaacatgtgtcacatccatttgccaaatagagttaggttccagtcctcgaggattaactcctcctgtaaaagatgaggaatataccatttggcaagttgggcactgctggataatagctttagcttctttccaggtgatgctgtatctgcatttgagaccagaggcattaaaatgggttaaattgtgaaagtgtctagcattagatattgcagtagcaactaggcaatcagccatttgattcccttcagtcaaaggtcctggaagaggtgtatgagctctaatgtgagtgatgtaaaaagggtgcattctactcctaactgctgtttgcaattgggtaaataaagtcatcagttgttcatctgtatgaaacagtagctgaccattttcaattaactgtgtggaaggaaccatgtatgaagaatcagaaatcacattaataggcatatcaaaagtagtcaatacctcaattatagctacaagctctgctttttgagccagaataagaagctttgctattactagacccatctgtaaaaacattatcagcaccttcaattggtttacatttagttattttaggaacaatccaattagttaatttcaaaaactgaaacagcttcattttaggaaaatgattatcaagaatacccacaaagtcagctaaatgggtttgccaagtaagactatttataaaagcttgctatatttgtgcctttgtgagagggacaatactttttccaggatcatatccatgtaatttaacaatctgagttctcccaatccctatcataatagcaatttgatctaaataaggagttagagtccgtgaattagtatgtggaaggaaaagtcactctactaagtcctgttcttggacaataacaccagtatgtgaatgctgagttgaaaaaattagcaaatccagagtcttctctggatctattctatttatctgagctttacggacttgcttctcaatcagttgtaactctccctcagtctcctttgttaaatgctgtgggctagtgagactaggatttcctctaaggatagaaaacagattactcatggcataggtaggaatgcttagagcaggtctatccaattaatatcccctaataatttttgtaagtcatttaacgtttttagttgatccctatgtatggttactttctgtgccacaatggtagtgtcatttactaaggtccccaagtaggagtaaggagtagcagtctgaattttgtcaggagctttaattaaacaagtgggagaaattgaattttgcaagtgattataacattggagtaatatttctcaagtaggggcagcacaaaatataccatccacatagtgaataatgtaacactgtggaaattttttatgagtatgttcaattgcttgcccaacatacatctggcaaattgttgcactgtttaacatgccctttggcaacactttcccatgataacgctcagcaggctgcaggttgtttactgcaggaattgcaaatgcaaacccttcacagtcttgttcagctaaagggatagtaaagatacagtcttttaaatctatgactactaaaggccaattttttggaattatagcaggagaaggcaatcctggctgtaatgttcccataggttgcataactgaattgatggctcttaagtcagttaacattctccatttacctgattttttcttaattacaaaaactggagaattccaaggggaaaatattggagctatgtgcacattttctaattgtttagtaattaaaatctctaaagcctccagtttttctttatttagcagccatcattctatccaaattggcttatctgttaaccattttaaaggtataggctctggaggcttaacaatggccaccatcaaatattatttcctaatctttgttgggaactttgtttttccacttgaagtggttctttcaaaccttgcaaatttttttctagtcccataccagggacataccccatttcatgcactgtatgttgactttgagggctatataattgttctggaattagaaattgtgctccccattgttgtaataaatctcttccccataaatttataagtacagaagttataattggttgaatagtcccagattgtccatcgggcccctcacaatgcaaaatttaactactttgatatacttcagtggctttaccaactccaactatgttaaattgagcaggttgaattggccacgtggacagccagtgctgtagagaaatgattgaaatgtctgctcctgtatctgccaaacctttaaatttctttccttgaatagttatttcacaggtaggatgtttatcagtaatttgatttacccaaaaagctgctttgccttgtttatttctgcttccaaatcctcctgtttgtttaatttcactttttcccattcccacatatggcacaatcaggagctgtgctatgcactctcttggctctgctttccagaaaacagaggtagatataacaatttgaatttccccattgtaatctgaatccatgactcctgtatgtatttgtacttttaaacttaaactagaccttcctaaaagtaatcctattgtccctgctggcaagggtccacagactcctgttgggaccctttgcaggggttccccaggcagaaggctcacagcttttctgcagcataaatctactgcagcactactggctgtggtgggggacagccattgtacaggggtgagggaatggcctgagctggaaatgccccggtttagaacagggcctgggacgggaccctcatggcgtttccagaaattgggttcccatctttatcaaacttagaatgacattgattagcccaatgttttccttttggacttatttcaggatcagcagttttcttttttcccctatctggtggcccgactcggtgattttttctaaattcttttttagtatgaccatgcttcccacagttaaaacaagctccaggaaatggagtatttcctttatccactctcagccctgccattgcctgtgccaacaaggtagctttatgcagattaccccctataccatcacaggccttgacataatcaactaaatgtgctttccctcagataggttcacagagcagcctggcaatcgggattagcattgtcaaatgctaataattgcaacactataacctgaccagctgaatctgcaatcatctttataagagactcctgtaactgagctataaaatcaatgtatggttcttttggtccctgttttatagcactaaaggaagggtattgttccccacctgaagtggtcttttcccaagctctaatgcacactcctctaagctgttctatgacatcatcctgcatgaccagttgtgcatctaaactagcccaaccgccaacccccaaaagttggtctgagttatattaatttgaagttgggcctgggcactgtgagcagcctgaatggaagcttcatctgcccaccaagttttcaattgtaagaagtgagcaggagttagacaagctcgagtaagagcatcccagtcagtaagaatcatctgactggaaacagtaacattctttaatagtcccattacaaaaggagaacttggtccatactgatttataacttgttttaattctttgagtaatttcaaaggaaaaggctcaaatgtagctgtaatatttccctgttgatctgggggttgtgttctaatggggaactgccaaggctctaaatcaccctctcgtctagcttgctgaattcctgcctgaatagaactaagagcggtcgctcgaggtgctgctcgaacagtcactggggcaactagttttcacccagtgtcctctggaaaagaaagatctgaaggttctttttcttcaaaataataatgagggggtgcagaagggtagggatgaacctctccttcctttgccactttagctttagctggcaaataaacctggtctgtaacctctactgttactttgctatactctcattcctcctcctcatcattgtgaaaaagttccaaggtaaaatgaaccagaccccatacctgtcccattgttaccctgacacttctgagctccccttcttactcaccatggggattgctttaagagtactcgggtgtcctccagctagttttccattccaaccattgctccggtgaccctttgacctggattgaagcccccacaaatggacgccacttgccgagaccagcttggtcagggagaccctaacccagtgccactagaggaattaaagacacacacagaaatatagaggtgtgaagtgggaaatcaggggtctcacagccttcagagctgaaagccctgaacagagattcacccacgtatttattaacagcaagccagtcattagcattgtttctatagacattaaattaactaaaagtattccttatggcaaactaagggctgggctgaattaaaggaatatgttgggcgagttaactggagcaggagcatgtccttaaggcctaaatcgctcatgctattgtttatggcttaagaatgcctttaagtggttttctgccctgagcaggccaggtgttccttgccctcattcccgtaagcccacaaccttccagggtgtgtgttagggccattatgaacatgttacagtgctgcagagcttttatttatggccagccttggggccagtttatggccagattttggggggcttgctcccaacagcagtgttgtctgggttttaaatgtgaatggtgacatatcagagaagaaataataaagaatacaaaacaaagcatgatagtgttgatggctgtgtgagacctcgattcttctcactttcaaaaaatttaaacaagagacacaaaacaatgaagatgcagcatagagtgatttattgcaaagtagaaatactattttaaaagttaggtgaagaatagccagcatttgctgagaaagaaggaattcagggcaggctgccaaaagaatgagacagcaaagactggaactagggagactccatttatgggagtcttacataattaattataaggaggtgggaagaggtgttagtagtaagcatgttctgggtggtccttttggtgcacagacacagtggctgtacatgcttatatgtcacatatctccttaacatcttaaatcttcacacacgtgtgtgttttttactattataatgagtaaaaggtcagttagaggataagtaaaatcaaaatgtgcatgctctctacagtgcaatttccctactgaagagagctttgcttgaatggctgaaatacagtgtaaatgctggggtttattgtgttgacaatatgcagtcaccgtgcaatcaccatggctgccacatcccgaggacatcgtcactttcttgactacctagcttgcctcaatagtacttggcttgatttattccaaattatcaactctaagactcagatttagctgttatgtcaacattgtcaacagtgggaaaattaaaatttttaaatcaaacatatatgagcttgttgggtcactagctgtgtatccaagagaaattattttacatcccaggagcttcaatcttaattattaatataaaacactatttcccctaaggctactttaattcatgaatggtagctataacacttgaaagtctcatctaaatattaaatatttaagagtaagaataaaatcatttttatttcaaagatatgataagtgagtgggtgtattttgtcatatttaatgtatttttcttttctaaaaaatgccataataattgtattttttccagaataacagactatggatatttaagttatgactttgccaatttttacatatggtaaaactgctactgttaaatttaggttaaattttaaacccactgttttttagcttgtgtggtttttggctcatttggggaacaaaatatattagacgttgactgtttggggtaacttgggttcatttctgctgtctgttattacatctggggatttagaaacaactaggattaaaataagtttggtttggaatcaagcaacagaaaatcccaaaaggactaaggaaaatagctaatggatactgcctttcagtgagatttatacacaaacagagtttaatgagattcatgaaattattgcaagttttttaaatttagaaaccaattacctacaacatattaggcacttgtcttaatttgtctatggcaaccctatcttggggaagctgatattacagaaaaggatattgctactgtaataatatttggaacaaatgtttatgtgcttatgaacagtcccctctaataatctttagatacatgtcattctggctcaatccttttggcatgactgtaattccagagactccttcccaccgaagcgaagccatggagttttcagctgcttatgcttattttcagttagtaagcttcatagctgacgtcattatattggggtccccaggaatccctgagccttagagctgaccatcctacctcatccttcttgcttctcatggtctgttgttgagtccctctcactccatatttgagccttcatgagacttcagtttggagaaaccagagaaatgggttgccatatgtattgagttgacaatcagaatccgtttgaggataaagactttacatttattattcatggtacaaagcagtatttttaagatgtgaacatgttttagtcaaattaaatataaataaattttttttgttatgacatagtctcactctgccacccaggctggagggcagtggcgcgatctcagctcactgcaccctctgactcctgagttcaagggattctcctgcctcagcctcctgagtagctgggattacaggcatgagccaccatgcccagctaatttttgtatttttagtagagatggtgtttcaccatttgttcaggttggtctcgaactcctgacctcgtgatccacccacctcagcctcccaaagtgctgggattacaggtgtgagccccggcacctggccaaatataaataattttatcagtatgccaatgtgattaaaataattttatcaagttcaccaaatgttctgctttagactctcccaacacaaagatcaatatgtatgcactggtgaatattagtttttttggtgtatggttttgtttgtttacatttttaaagattttttctacttcatgctgatgttaaactacacaaagcttaccaaaagcactcttttaccacatttttctactaaaagtttaaatacttaaattttgaaagtgacgttctggattacccttttccttgtgatggagtctgcgtttattagtcctacattgcagtttctctttatgtggtgcaaggctacaaaaatgccatccagttgattttgatttattaggtaacagtagaatctgttttctcaggcagtagcatgagaattcttgatatgttacctttagacgtactgaaagcaactggataaatttgctgaaatttgtctttattcttaagggcactagaggctaagtcatagcaacacacaatatagttcagtccaactttttttgtctaaaattttgtggagctgcatccacctgtatgatgtaactcagtaacagcttctttatactaagccagaactcattttacctgctggttttgttttaaatgtatgagctgtattatatcacatttaaatcagtaaatgaaatgaattcagaggttatggaaagaaaagtacaggcacactaaaaatgaatttgaatctggcagctgacactgattaacaggttgagcagattggactagacctgcattcctgtaaacaatattgaaagggagaattgaaaacatcttcagcaacacgataggcctatgagatttgaaaagtaaatcgatttgtttacccatcttcagtcaatactaggttaaactggaaaattttgaacacattattccaaaaatgaaattagtaaattattctcagacttaatatgattaaaacaagacttctgggtatttgaaagcaccaaattattgatgaaagatatccattttgaacagattcttgatcttatatatatattactactaagtaaaacctaatactgatagctttaatatatgaaatatttgtgaatgtctatcactgtagtgaaaaatcaagacattatttaaatctaaattttgattaaaatatttgatattttaattgagtgccagtattcatatagtatggcaaagcacccagttctttagtattctgcaattttataaaataagccagaatttgtggagacatttgttaaaaaaacaaaaacgaaaacaatcttttctaaaaaaaatctagacatcagaaaatagagatactaatgttacactatataaacagtttgctgaaccctacagtaatctgtgaagtttttttgtgtgcgtacaacaatcttagattacctaaaacaaaacgaagtttctttcttctgcttaacatacaaaagtccaaaatatatccggacagacaggaactgtggctgccactttaaaaaaaacaaacatttcaccacgatacactgttttgtgtatgaacagatggaaaaccaacctttgaagttttcaaatcataagcagaagcattgtgcctctaagccttaaatatataaaacaaatacacacagtttattcttcttaatttaaaatatactgttctttgaacatcaaacgacattagactatcaaaaacctcataagtcatacaagtgtcaactgtattttcaaaattataagaacttagaacaagtaaactaaacagctacagctacagtttagttaaaaataataataataaactactctgtatttgcccttgtgatgagaatcacctttattcattttggaacaaacaggaaatgctgcagtggtaacttgctgagtggcgactgcgatgagatttactgtcctagggatgatgggatccagtggaccagaatcgtcagcaccttaccatggtcactgctgtcctttcactctgtcattcatttatcagacttcttcatcaattccgtctctatcgttgtgtgaacggttttgtactgctttagcatctgcctttgattgctgctaattttctttgttcatctttctggtccatcttggtggctgctttgctgttcctctttgaggagttcgcgcagcttcaccctcaggtgttccaacagtccgtccatctggctcaagctgtcgggcatttttcctggttcttctgttcctggcgtctgagatttgtcagcagggcctggttttcagggaccacggctaccgcctccttctgcccgcggggcggctcctgcacctctggcgggcaccggttccagccacggtttagccgagaacagggggaaccgcagcagcagatggagcgcccacgtccggggtcgcctcggctctaacccttggtcatggctcagcttggtgcgcagaaacccgacgtcaatcagagcattttgcgcagctgggcgagctttcctcggcatgcggggcagttcccccatcatctttatgctgccacctccgctttcatcagagagttacacaggatggtgcaggggcccggagacaccgtggaagagtccaggggagtgaggaggggctgggccgggcagcctcaggcccagcgcatgatggcgccccctcacgcctgagcagaaatcagccactgccacctcggagaggacagaggggcccaggcttccccagccagcctcgctctgcaccagcagaggaaaaaattattttctaaaaataaataaataaataaataaacaaataaataagtaagtatggagaagaacttgcagttctgacccaatcaaattttcattctttttctttcattttttttttggccgttttctcttaaattgtgctctcctgaagtcagatttcatgttccatcctcacgtggcaatttaaatgtaattataatggtcccaaatttagaaactaaaaatgttaatgtattttacccatgagtgctaggttaacattaaattttcaatagtgctttctcaattctacacttcattattttctatttgatcctgttaactaaactatagaaaataaaaataataaaggtttgatttgcatagtttcacagtttacaaagaatatgtattcattcctttaaccaataaatgtgtgttgagcacacatgatatgccatcattttggtagccttagaaaataaaatagagaaaggaaagttttgatctctactctcatgaaactttcagtctaacttcataaaatcctcatgcattcctgagaagtggatacctctgaagtttcctataaacctcctaccccaatctgacttcaggagagcacaatctaagaggaaaaagcaaaacaaaaagaaaaaaagatgaaaatgtgattgagtaagatatgcaagttctattccataattttgttaggaaatagttttcatctctactagagcagagggaggctggctgggaagcctgggcttctctgtcctccctgcagtggtagtggttgatctgatctctgctcaggtgtgaggggcaccaccatgcactgggcctgaggctgcctggcccagctcatcctcactcccccggactcttccgtggtcactccgtgcccctgtgtcatcctgtgcatccttctgatggtagaggaggtggtagcaggaagctggtgggagggcctggctccataaactgaggagggttcacccagctatgggaaatgctctggatgaccttggatttctatgcagttagctggacctcatcccagggttacagccagggcatccctgagctgggtgacaccagatgtggatgctctggctgctgctattgtttctgtagaatcagcacccaccagaagtgcaagagccaccctgcaggtggaacgaggtggtagccatggttcctgaaaaccacaccctgctgacaaatctcagatgccacaaacagaagaacggagagaaactgcccaagagcttgagccaaatgaacggactgctggagcagctcagggtgaggccacctgcacttctcaatctggtacagcaaagcaaccatcagagatggacaagaataataaaaagtcaaagaaaattagcagaagttaaaggcagatgctaaagcactgcaaaatcattcatgccacaatagaaatgaagttcatgaggagttaatacaggagttcttaagaaattattttaggcagttaaagagggtaaaagagttcttactggaattttccttttataaaaagcagcccccaaaccattttattcctaacagaaagcagcctaaaaactcaatccgcaagcttataagcaagctagagggttgcatatgtaaatggaaatgcctgtactaaaagccaggtatatttcaacatggcaactttcccctcttttctttttcaccatgagtgcagatgtcatggtgacagccaggtagtagccacgtttgcataataaaaggctacggtcggggagccagtcttttcactggctatgtaaatggcatgcctgttcaaccaataccctgggccctatgtaaatcaatcactgcctcctcaagcctctctacaaaatcaatcgtgttctgccccaaacccagaaactctactgggcaacctgctttctcaggatgatgtagctttctctctctcttctttttgtctattaaactttctgctcctcaacccattcctcttgtgtgtttgtgtcataaattttcctggcatgagaaaacaaaccccaggtatttaccccagacaatgcagccatttcatttggaggcttgtccaggatcagaacaaaatatagaatcattggaatggtgagtatggagtgatcatcaaatctgtcctttaatttcaaggctctcagtctccatgttaaaatgctttggaccagtttcctttcacagagaatctaaccattgtatgaggctgggagaagtcctggaacaactgaggttttctggccagggcacatcctggtgttattcaaggcttctggactgaatccagcctttgacagctcatctacgtgttggtaaaggatctccaactatcttgtcacaaaatttttcttctttcctgtctgtggttactgtgtcttctatcctatctgtgtatgcaatgtgcaggaagtcttggtaaatcctgcagtactggggagcacgtggtatttccaagccaacagtgcaacgaagtggcaatagaaatcctcttcatgaggcacattgtcagtcctttgccatgcactgtagtttcccaactctcctccctttttgcactgctaaaaatcaggctctatgcctcttctgtgaatgggaaaggtctgccttcaacaattaaaagaaaaatgtcagccaggcacggtggttcatgcctgtaatcccagtactttgggatgctgtgcccggtgggtcatgaggtcaggatttcaagaccagcctggcccagatgttgaaaccccatctctactaaaaatacaaaaattagccagtcgcagtggtgggtgcctgtattcccaggcacttggaagactgaggcaggagaatcatttgaaccctagagacggaggttgcagtgagctgagatcatgccactgcactctagcctgggtgacagagcaagaatccatgtcaagccatccccatcaagctaccaatgactttcttcacagaattggaaaaaactactttaaagttcatatggaaccaaaatggagcccgcatcaccaagtcaatcctaagccaaaagaacaaagctggaggcatcacgctacctgacctcaaactatactacaaggctacagtaaccaaaacagcatggtactggtaccaaaacagagatatagatcaatggaacagaacagagacctcagaaataatgctgcatatctacaactatctgatctttgacaaacctgagaaaaacaagcaatggggaaaggattccctatttaataaatggtgctgggaaaactggctagccatatgtagaaagctgaaactggatcccttccttacaccttatacaaaaattaattcaagatggattaaagacttaaatgttagacctaaaaccataaaaaccctagaagaaaacctaggcattaccattcaggacataggcatgggcaaggacttcatgtctaaaacaccaaaagcaatggcaacaaaagccaaaattgacaaatgggatctaattaaactcaagagcttctgcacagcaaaagaaactaccatcagagtgaacaggcaatctacaaaatgggagaaaattttcgcaacctactcatctgaaaaagggctaatatccagaatctataatgaactcaaacaaatttacaagaaaaaacaaacaaccccatcaaaaagtgggcgaaggatatgaacagatgcttctcaaaagaagacatttatgcagccaaaagacacatgaagaaatgctcatcatcactggccatcagagaaatgcaaatcaaaaccacaatgagataccatctcacaccagttagaatggcaatcattaaaaagtcaggaaacaacaggtgctggagaggatgtggagaaataggaacacttttacactgttggtgggactgtaaactagttcaacccttgtggaagtcagtgcagcaattcctcagggatctagaactagaaatgccatttgacccagccatcccattactgggtatatacccaaaggactataaatcatgctgctataaggacacatgcacacatatgtttattgcggcattattcacgatagcaaagacttggaaccaacccaaatgtccaacaatgatagcctggattaagaaaatgtggcacatatgcaccatggaatactatgcagccataaaaaatgatgagttcatgtcctttgtagggacatggatgaaattggaaatcatcattctcagtaaaccatcgcaaggacaaaaaaccaaacaccgcatgttctcactcataggtgggaattgaacaatgagaacacatggacacaggaaggggaacatcacattctggggactgctgtggggtggggggaggggggagggatagcattaggagatatacctaatgctaaatgatgagttaatgggtgcagtacaccaggatggcacatgtatacatatgtaactagcacattgtgcacatgtaccctaaaacttaaagtataataataataaaataaaaaataaaaaaaagaatccatgtcaaaaaaaaaaaagaaaaagaaaaagaaaaatatcctccataaccaaattttgttccaatgctatcccattagcaaataaataaatcaataaataaaagccgttattctgtctccaattagaagagtacttaattagtaaggcaattttaagtccagaagttaattggaactgttttctaagggaaaatgttttagcatgggccgtaatagcaggatatagagctcaaaccagcatacttcctccattaaggaggaaggtgtaaccattgcctacatgctaccattacacagtttctccagagatcctttctttggggtgccaggcagatcacacaagtttagaaagtcaaagggtagtcatagtggataactaaggctgtgtgggtaattgttgttaaatcccatcacttcattcatccagttccatggcttggagggccatacctataaccatgggtggcacatttaacatggtgctgggacccaggaacaaaggagaaaaaacagtcagggagatgcttcaactgttttttcctccaccctgggtcacatcaaaaggagggagactaaaagaatgcttttattctcacttattttacttttttttttccttgagatacagtctcactctgttggccaggctggagtgcagtggcttgatcttgactcactgcagcctctgcctcctgggttcaagcgattctcctgcttcagcctctcaagtaactgggattacaggcacgtgccaccatgcccagctaatttttgtatttttagtagagatggggtttcaccatgttggccaggctggtctcaatctcctgacctcaagtgatctgcctgccttggcctcccaaattgctgggattacaggcatgagccaccatgcccagcctattctcaattctttttctagatgggtaacagaccaacttcagcaactctctggagtgtactctgaaacaccagaactcctttaacctcaggactttgaagagaaaagtgactttattttatttatttattttttattttttgcatggggcatggtatttatactaaacttttgcaagtgtcataagattgacccaggttttttttgtttgtttgttttgacattgagtttcacttttgttgcccaggctggagtgcaatggtgtgatctcgcctgactgcaacctctgcctcccaggttcaagtgattctcttccttggcctcctgagtagctgggattacaggaacccacatccacacccagctaatttttgtatttttagtagagatggggtttcaccatgttgaccaggctggtcttgaactcctgacctcaggagatctacccaccttggccttccaaagtgctgggattacaggcatgaggcaccgtgcctggctcaacccatgtttttttaatagtcatatcaggcaggctcatagagaataactcccccaaattagaaagcaacttctggtggaaccatctaagagtgtcccttatttggggccacctcaactttccttctcataacaagaccttaggcaagtaaaggaagacaggctgattttctgacaaccccaataggtatatagaagcatttctgaatttaactcaggtgtttcacctcacatgaaaggatgttatgctgcttctaaaacaaaccccaaccacagctgaaaagcaggcagttctgcaggcagcagaggattttggagatgagcaacaaatctcctataatacgccaaaaaggaaaaaagggagatagggaaagtgaagaaatagcagaaacaccatttccaataggaagtgaagcagttcctcttgacaacccttggaaccccaatagctctgcagatgaatggaaaaggaaatactttttttttttttaagatagagtcttgctctgttgcccacttgctggagtgcagtggcccaatcttggttcactgcaacctccacctcctgggttcaagccaattctcctgcctcagcctcccaggtagctgggattacaggtgtgtgggaggacacccagctgatttttgtcctttcagtagagatggagtttcatcatgttggccaggctggtctcgaactcctgacctcaggtgatccacccacctcggcctcccaaagtgctggggttacaggtatgaaccactgcgcctggcagaaacactttttaatatgcatataagagggcctacaaataactctcaaggccaaacctctcaattattctaaactgtctatgattgaccaaaagccagatgagaatcctgcagcctttatggaaaggctgagagaagcactaacaaagcacacctccttattccctgattcagtcgtcagacagcttattctaaagaacaagtttattacacagacagctattgatacagaaggaaacaacagaaacaagctataggaccagatagcaccttagagaacctcctgaaggtgaccactttgttcttttataatagggaccaggaggaggctcaagagaaagagagaaaagtcaggaggataaagctctagtagctgctttggaagcttgcaaagtccaggatccctgaggtgcatctgctagttgccattggtgtggtaagtcagggcattttaagaaggaatgcccaaacagcaagaagaagccatctcgaccctgtccagcatgtgatgaaggccactggaaatcaaactgcctccagagacagaggtcactgggtttacaactaaattacctctcgaatccaggcctcccctcttcccatagcatgactgtaaaggggcatctcaggaaaaactgtaatatttttctcaatctcttagttgcagttaggagcacttgttatttacgtatgcctccaagccattgtcacggtagctgtactagtcagaaaagcctctaaccctaggaaataacttaactgtttacaacccacgtaatgtggcagaattactgtcttctaggtggagcccttagctaacaaccaaccagtatagcaataaatacataggccaggataagcagtagtcactgtaaataatgtctctctccagacacaagtgctcaattagctggactaacagctcttacaagagcacttgaattaagcaagggaaaggtagctaacatttccactgactccaagcatgttttcttagttctccatgctcatgctgccatttaaaaggaaagacattttcttaccactaatggatcttctataaaatatcaccaggaaattaacaggttattatcctcagttttccttccatgagaaatggcagtgatgcattataagggacatcaaaatgaacaaataaatagccaaaggaaataggttagctaagcaggcaactaagtcagtggcaaggaagccccaaggcatcaatatacttcaagtccttttaatctaggaaggccctataagagaaattaaacctcagtatttttcgcagaaataaaataggccacttttttttttctttgagatggagtctcactcttttcatccgggcaggagtgcagtggcatgatctcggctcactgcaacgtccacctcccaggttcaagagattctcgttactcagcctcccaagtagctggaattacaggtgcccgcgaccatgcctggctgatatttgtatttttattagagatagggtttcaccatgttggccaggctggtctcaaactccttacctcaggtgatccaccctcctcggcctccaaaagtgctgggattacaggcatgaacctctgtgcccagccaaaataagccatttcttgagggcatactttccatccctcaggatggctacagtcaggggatggcaaactccatttgccagcctccagccaatggaaagtcattaaaatcctgcaccaagattttcacttaggaacttccaacagtaattaacacaactagaaaaagtccaacctcaggaaatagaaccatctctatttaacccagatttggtattagtgaaaactctcccttctctgcttccctaagccaagctaggaagggccctgcactgttcttctccctcagcagtaaaagttacaggtatcaagttctgaatacatgacactcaaatcaaagcctgaagagctgagggagcaacccctgatggcccagaggaacgtcctcaatatcaatgtgaaaaaatagaagaacttaagctgaaaaccataaaagataagtgaggtctactcatcttactcagtctcatttactcctcactaaataattttttaaatttttgcccttttctctcaaaatttactttaatatcttaaaatattagaacatttaaaaatgcatacatgcagggagattttaattatacatgggtttgcatttgtaatttcatagaaccccaaaggaaaatgttatttcttggcaagtaaaattttaaacaaaaattattgctgggcatggtggctcagatttgtaatcccagcactttgggaggctgagttgggtagatcacctgaggttgggagttcgagaccagcctaaccaacatgaagaaaccctgtctctactaaaaatacaaaattagctaggcgtggtgtcgcatgcctgtaatctcagctactcgggaggctgaggcaggagaatcacttgaacccaggaggtggaggttgtggtgagctgagatcacaccattgcattccagcctgggcaataagagcgaaactctgtctcaaaaaaaaaaaattatctattatgcaactcttgcacgaattgttatactcactccactatttgcagaactatacactttggcacccgtaatgtgtaattctgattgcaaaattctaattgctataatacttggccgagttatcatacttataacagtattaataattgcaggatttagtgaaggttgttttgcttaattattatccttgtatcagaggtaatagctacagacaaaagtaagcatgaaagttttacttcactgagcttgataggacttttcattaaatattggtaatatgggctgggtgcagtggctcatgcctgtaatcccagcactttgggaggctgaggcgggcggatcacctgaggtcaggagtttgagacaagcctggctaacatggtgaaacccattgtggcaggcacctgtaatccaagctacttgggagtctgaggcaggagaatcacttgaacccaggaggtggaggttgcagtgagctgagattgtactgagtgagttgtagagaaatgccacactttgagactaattgaggagtccttttattgccggcgaccaagagatggctagtgctcaaagttctcttggccctgaagaaggggctagattttgttttatattgtggtctaaataggggagggggagtttagctgaagcaatttttacagaagtagaacaggcaaaaagttaaaaaattaattggttacagaagcagttacagaaaaataaacagttccaggtgcaggggcttaaactatcacaaagagataaatgcaggggttttaggggccatccactgagcatgtccccaggagctgctggttcagcttgcctcaataccttattagtaagtgcattcctggatgtgcttggagtcagcttgcactagttatgcccttacgggagggaggcaaaggggctgtaagtgaaggaactaaaatggagtctgtctggctctctcagttaagagagacaattaggttaaaacaaggtagggtatcacattccccactcgtgttttggggaatcaaataattgattccttggttataacaagggggtatgttgggttctatgatacataagtttggtagaagttatgtgctgctttataaagttaagaaaccagtttaatatatgaggcccgaagactaaacctaacaggaagaggagaaggggtcctgccaatccagtaattaggatagttagccatggattccagttaaaggtgcttttgtaccagggggtgttactttctcattcctgttggcatctatctagatttttttgaacttttgggggtgtatcttttacgactctagactgattggcatagaaacaactctctcccagagctgcgcataaccctccttgggagagaaatagtagatctaagcctcagcagttttgaagggctgcttcagctagagactctacctgggtatgcagtatatttctggctgattggagattgcttaaatctgcatctacttgttgggacagggacattagtccagtttccccttgaataagggcagctgtgctgatggctgctgatccagctatgctaaggctggccagaaggggcacaaggagtggggcagctcagcaaaacctggaatgtaattcagggggagcaatgagaagttgtccctctggcccactgtacacatagacctgggggagcacatgaaccaacactcacaggagaggccccggttaagtcccactgatgcagcaagtgaggtcagaagtgcaggccagccaggtattgttgggtgcctggtaggagactgaggtgtttaaggtagtaagtagagaatgattacaggtagcctgaaaggcagaagcagacaagttatacccagagctaattagacaggaggtgttctttgacacttctcctagtgtaagggcatggggctgtgtatgacaagaaagagagttaactttgaacatggctttattcctaacccaacataccatgggggtttggccttcaggcacaaccagcaatcttgggctagtttaggctggatgatatttaggaggtgatgtaccccatccagaatggatatcaggctggattggagatgttgttgttgtaactgagatctgggaacaaggagtggtggtgggatagttaaattgaccctgtctgggtgtctttggaacatagggtcacctaaatcagttaaaggcctggttgacttaggagggctctatgggaccaggacctttttttggatggtgaacatagttccaacatcaaatcctgagatacaaagccttaatccccatgacatgccataataccattgagctgaattagggttacagacagttatagtgagagggctacaattttttatagtacacggtctaggacgggaattgtgagttatggaaagggttgaggaccaggttgatcctccagggtaagtggctagggttacacacgaccagtgagggcagaaaaactgaaaagaatctcaacaactagagtcagggtgattttcaagacagaggtaaaagtcaacgccttggagtcctttttttgcacctttagagctcccacctccggtctagcttcctgtgtgtctgaatcctgcagcaaggttgatgttccccactcctgcgactggcagattgcactgttcttcatgggtacaggcaggctctgggaacaaagcacataaatcgactgcaaaagagacttccttggaggttcctgccttccaagtagtgtttgaaaactcacatcctgttgtgaaagacgtgaggagaaaagagtaggatggagcagacggcataataggcagaaacaaacaaaagaggtaaataaaaaggattaatttgatggctttactcaacttaggtgcagttttaaggggactggcccaggcttggggacccatgtttcctgctgggctttgttggctttcttgatgtcagagtgatgaatccaagcatggataccatccacctttagagccgttggcgtggtgagaatgacagtatgaggtcccttccaggcaggagtgagtccttctttctggaactttttaacatacaccaagtaacccggttggaaagagtggcagggtccagtctggcaggaaccggattggaatgtgctcaccagaaaagtggctggatgatgtctcatacctgttggagagactgcaagtactgtaacaaattagcttgtgagatttctgctaaatggttatctcttagcttaggcaagctagtgcaccccttttatacatgatttcaaaaggtgaaaacccagcccggtaaggggtgcatcttactctaagaagggctaaaagaaggagccttacccaattttcacctgtctctaggattaatttagtaagagtgttttttagggtgtggtttatgcattctacctgtccagagctctggggtcgataggcgaaatggagtttccattgaatgtttaatggcttgctgaccgataagctatggacgaggtgaaggctggtccattatcagaccccatggcaacaggcagcccatgtcgagggatgattctattgagtaaaagcctaactaccatggtggcagtttcatttctgtggcaaatgcctcagtccatccagaaaaaatgtctactagcaccaggaggtatttataccctgtccggtgtggttttatttctgtaaagtcaattttctacttttctcctggtgagcttccctggaggccgtggcctgggctaggcttgggacctcatctggcatttacctgagcacaagccatacaccagagagctgcttggttagttaagtcctgaaggtgggggatcttgaaatggctctttagaagctgggccagttttattcttcccaaacaggtggtagaatgcagatgattgattaaagtttccccaaaggcttgggggcataaagattctggaatcaggaagaatccaccaaccttcctgatttttactggcctgaagatctgaagctagtttttcttccactggggagtattctggttggtctggcaagtcagtttgtggaaaggacactgtggacagcagggttaaaggggtgactgggagcagagctgcctcttgagctgcagagtctgctctttggttaccacaggcaacggctgtgctctgtctttgatgtcctttgcagtgaattacagccatctgctgaggaagccaaacagcttcaagcagggccaaaatttcttctttgtttttaatagtctttcctgctgtggtgagtagccctcactcttgatagatgactccatgtacatgtacagtagcaaaagtatacctgctgtcagtgtaaatgttaatacatttgtccttaccccatcagagagcctgagtgagggcgaccaattcagccttctgtgctgaggtacctgccggccgtgcctaggcccacagtatatctgtctctgttggaatggctgcaccagcctttcatactccctgttcaaggaagctactgccatctgtaaccacggtggcatccaactcctttgggggcacatctcagagatcaggtcggccagtttccatagtctctaacagttcttggcagtcatggacaggtgtggtaaggtctggatcagggagcaaggtagctggatttaaacaccttgtgggagagaaagctaaacaaggctgatctaacagtaaactctgatactgcaggatgcgagcatttgacatccatttgccagaagcacttcatagcaaagtttctatggcatgaggagctgtaagggttaaattctggcctagagtcagtttatcagcctcctggaccaggcttgtttttgctgctgtggctcgcagacaacgtggccacctggagaccacagggtctagctttttagacaaataggccactgggggtcaccatggtcccaaagtctgagtaagtacacctttagcaactccctggctctcatgaacaaaaaggtgaaatggttttgagatatttgggagggcaagagcaggggcctcagttaatgtcttttttagattttgaaaagcctgttcttctttgtcagtccaaactagtgggccattccctccggtagcagtgtacaggggcttagcgatttctgtgaaccccagtatgcataaatgacattatcccatggtccccaggaattcacatacctgtctcttggtggtgggagtggggattcgcaggatggcttccttttgagcactggtgagtgccgtttttcctttgtttatcttttaccctaggtaggaaactctgggaagacaaagctgggccttcttggtgagacctggtacccgagttcctgcagaaggccaagcaggtccctagtatgttgcaggcagctgtcagtaatttcagtagctaataaaagatcatccatgtactggagaagagtacagttagggtgactggctcagaacggtatgagatcttgttggagagcttctccaaaaagtgtgggggaatttttaaaaccctggggtaactgggtccaggttaattgggtggtgtttcctgagccaggatctgtccattcaaaagcaaagataggttggctttttgggggccagaggaatagccaagaaggcatcctttaagtcagtgacagtgtatactgtatgttctggtgggagcagtctgagtaaagtataagagttacggacagttggatggatggtaactgtccacttgttaacctctctcaagtcctgtacaggctggtaatcatttgttctgggtttctggactggcaaagatggagtattccaggcagactcacatggtgtgaatataccagcttgtaacagttgctgaatatggggatagatttcccctctagcctgctgactcataggatattgttttacctggactagcaaggcagtggccaggagttgtacaactactggcagatagtgctttgccagtcctgggggtttgactcagcccagactcaaggaaagagagtctgtaaatccagtaggagaggattaattttattatccagtgcttgtgagggtgaaactaagagattttttttgatggaggggtggttagcaggagctgaacagcagtgggcattgtgtcccctaaagcaaggtgagcttgttgggccaagaaggagatagacgccttcagcttatgaagtaggtctcatccaaggaggggaaaggggcactctcggactatgagaaatgagtgggttgctcttttctgtcccaaactcacctctcatgagtgggtgacaggatattcctgaatagctccagtatccccttgcacagccacctttttattagagacactgcccaagggcatttgcagtactgagtgttctgccctggtgtcaattaggaaacgtacaggccggccccccactgtggcggacaccatgggttcccgggggccaagggagagggagacccagccccatcaatcagcatattcctccacagcagggaggatgaggacctttttattctctggtttttcttctggttttaatgggcgttccttcttccagtgtcaaatctgcttgcaataagcacattggttttttagtacaggagcctgctcacctttttggcctttttggcagggacccgagatctcctggccagcgctctgtgctgggggcccttccctcctggcttcttggatggcagccactaagatttttgcctgtctttttgatgctttgtcagcagccttttcagctgcctgagatgcctctttttgtttttcaaactcttgattgtcaaaaactttctgtgctatttctaaaagctgaatgatattcattccagcaaatccctttaatttttgtaatttctttttaatatcaggggcctcctgagccacaaatgccaaattaatagcacggctattcttaggagccgctggctcaaaaggggtgtaagtccaataggcctcctggaggtgttccaaaaatgctcccagtgactcatcaggcccctagaaaacttcagttgtcttagataaatttatgggtttttgagttgctcctttgatacccacaaggagataccagtgaaaatcatccaaagctgtctttccccatgaggagtttggatcccaactgggccgggtagagggaaaaacctccactaggaggtcttgggcttccccctctggtctaccggctgatgtaaggaaatacttcctagcctcccttcagatacagtccctctcttcagaggtgaaaagtgttaaaaggagttcctgacaggcatcccaggtgggccagtgagtccggagcatggattccatcagtgaggtcaagacctggggcttttcagagtaggggggattatgaacctttcaattgtacaggtcagaagtagagaaggggacataaactaaaaatggagcagagcgctcactgcctggagggatttgggcctctctcagcaggaggagaggggccacctcctctggctgaggccgtaattgggtggctataggtggagaagccacagagcatgtagtcaaggagacatgggaagattctgggagagcaggagggttgtagggtggcaaacatgggtgaggaaaactttcctcttctttagaaggaggcagtacaggaggagccgagggagctgagggttggggcaaaagtgcagtcgggctcaaaaggacctgggaggtgggatcatgaatggtgcatgagcagagccatggaggagggctctggaccaaatctagccattgatcaatgtaaggaaactgattggggtgtccgggagttccagcaatgacctgccacacagtctgcacagttgtgagattcagtgacccttctaggggccacctggttccaaactgtggccattccacttcataaagtgtccagagtttgctttcttaaggcagactccataatcctctgagaagcccagagaggaattttgtaacgtatattggaagggctccaatctttatggggccaggaagaagagttccccattctggaggcaattaacaaggtctaggcgaaatattaaactcagcatggacagagaaattcacaatctggggggctgtagtataggaagaacagaagtattataaccagaagaagtaggaaaacaactatagccaacacttcttgtcacataagttctgtttctttaagctttgagatctagggggaggacaagaggtgggtctgaggccagtgggacctatgtgatcctcccctcctttctgacttatagcccaaatatctttggtatctccacgactcaaaggcaaaaagtttaaagttggccctttcttttaaggattttaggagggagagtagagtcattggacgttggacttgctgtgacacaggaaaacaagatgggtggggtaagggatggggatgaggaggaaaggggccactctgatcttttctaaggtaggagagtagccagagggatagaataagaatccaggtggagtaaagcagtatgggcacaggtttctctgcacagtgccttatctaagggcatgggaaaagttatgggatgacagaaaaggtgagcaaggaggactgcagggtggctattttgaatccaccactggtctaaggcagaggtggtccagtcactggggcatggggtgtggcaatccaaatgctagcaatctttatggtgccagaaatcccaaacgggcaaatgttccccacacgcctccccgtaacaacacctgatttgtttctgacagaaaaggcaggactgggaagaccagcccaaatgactgatgagaaatttgacctcctgtgttagaaaatctgcattcaggactttaaagaagttcttgcccagtcatcttcggaaatatcgatgacctgacatgtgaaacttagacagacaccagacaggacaagagacaccggggtatacaaacaattatgacaatttttatagacagacaaggggagggggtcccgtgatgggatcagccagatgcccacctggctgctccgccggaggggacttaggctcctcttggcattggcagaccggtataaacccaccggctcagatcaagctatgcccgatgctgccttaagccttatgaggtcgccacggaaccacaggtgagggcccactccaactccgtagctttcaccgtggagctgcaaactggaaattcaaggacaagcccttgaaccccacattcacacacacacttacacagagtttatcacaattctttattcccattctaaaacagaggtctcctagaaacctgaatgagagaaggagaagagataaaaagagagagagagaaagacagagagaaagacagagagagagagagagagagagagagagagagagagagagagaggctagtcttaacagagaaggctgacagaaaccaggactccgtcctccagcatcctggaatatgggcagagtcagaaggacgccctcgtcagggccgcttccctcccagagaaacagagtcagatctgacttaccttcccaggaccagaaatgcaggactcaggagttgattttggagggcacacaccggcagtcgatccgttcccctccggaagacagtggcctacgggtctctggaacagcttcaggaggtgcctcccctataagcccgctgtccagccaggagagcctggagcgagtccggcactcaccaggtggcaattatcttgctggggcttccaaatgttgtaaccgagcgagttgtagagaaacgccacactctgagactaatttcaggagtccttttattgccggtgaccgagagacagctagtgctcaaaattctctcggccccgaagaaggggctagattttttttatatcgtggtctaaataggggaggcggagtttagctaaagcaatttttacagaagtagaacaggcagaaagttaaaaaaattaattggttacagaagcagttacagaaaaataaacagttccaggtgcaggggtttaaactatcacaaagaggtaaatgcaggggttttaggtgcgtccccaggagctgctggttcagcttgcctcaatatcttatcagtaagtgcattcctggacgtgcttggagtcagcttgcactagttatgcccttaagggagggaggtaaaggggctgtaagtgaaggaaataaaatggagtctgtccggctctctcagctaagagagataatcaggttaaaacaaggtagggtatcaagagatcatgccattgtacttcagcctgggggacaagagcaagactttgtctcaaaaaaaaaaaaaattggtaatatggtgcactgtaagctacagaaagacagttataaagaaagattttatataaggaagaatcttgtatgttaaattcttgttctaaaaggagatgactggttgtttaaagaatggatgtttaggacaagtcagaaagtttgttataagatggtctgtggaaataaagagttgaataattaaaggaaaggcattgccaagattaacactaaagttactttagccaccggatgatgtatttctcccaatcatattgaaagttataaaaatggcctaaacctaaaagtattccctaatggcaagtcaaggggaaaatgtatgtttttctcaaagaaaatgttacttttatattaacgtttctggtaatgtacagcaacatctagtggaggcaaaccagtattacaatccattgggacaactaacaggtgtagaactctgctattataccataaggttgtattaccccactagcagcggtcatcttaatatgaatattctaatcctgtcttcaaaaccttctggtaaaaattatctcttttttgcctaggtgctgcaaacagagccacacgaggacacaccattctttttttttattgtttgtttgtttgatttaagacgaagtctcgctctgtcacccaagctggagtgcagtggtgagatatcggctcactgcaacctccgcctcccaggttgaagcaattctcctgcctcagcctccctagtagatgggattacaggcacgcaacaccaagtctggataatttttgtgtttttattagagatgcggtttcaccatgttggccaggctggtcttgaattcctgacctcaggtgattcacctgcctcggcctcccaaagtgctgggattacaggcataagccactgcacctggcctggacacaccattttttttcaagaactcttagatcaacctcaggaggagccctaactgctgttccccaacatgatggcccttttcagcaggaagtatcttgaaagattcgtcatctgacaccccctaacagcagttaggaatacgtctcctgaggggagaataatataggagttattaagaaattattttaggcatttagagagggtaaaagagttctctcactagaatttttctttaataaaaagcagccccaaagccaattcttttctaacagaaaacagcctgaaaagtcaagctgcaagctgataagcaggctggagactttcatttgtaaatgcaggcggctgtattaaaaggcaagtacatttcaacagaggtgaattcctcctcttttttctttgacaccacttgtgtgggtgtcatggcaccagccaggtaaagccacgtgagcaggtatcatggtgacaggtagaagctacatttgcataataaaagactagggtgggagggccagcctttgcatgggttatgtaaatggcacacctggtcaaccaatctcctgtgccctatgtaaatcaatcactgactcctcaagcttctctacaaaatcaattgtgttctacccgcaaccaggaaattttttaggtgaccctgtttctcagcatgaggagctttctctctctctgttatttttgcctattaaactttctttttttttttttttttttttttttgagacggagtctcactctgtcgcccaggctggagtgcagtggcgccatctcggcccactgccagctctgcctcccgggttcacgccattctcctgcctcagcctcccgagtagctgggactacagacgcccgtcaccacgcccggctaattttttgtatttttagtagagacggggtttcaccgtgttagccaggatagtctcgatctcctgacctcgtgatccacctgcctcggcctcccaaagtgctgggattacaggcgtgttgtctattaaactttccaccccaaaatcaatcctcgtgtgtgttcgtgttctaaattttcctcgtgtgagacaacaaaccccaggtatttaccccagacaatgcagccatttcagagtctgggaaatgaatcttagtcacagaaaaaaagaacagcaatgaacatggcaaggtgcttatgattctggtccactggatcttcctatccctaggaaagtaaataccatcacagtcagcacccagcaagttaccaccatataatttcttgtttgttccaaaataaatacaggtgattcttatcacaaaggcaaataaaaagtagtttactttttaaactgaactgtatcagtttagtttactcttaagttcttataattttgaaaatgcagttgacacttgtatggcttatgaaatttttgatagtctaacattacttgaattgttcaaagaacagtatattttaaattaagaagagtaaactgtatgtgtttgtttcctatatttaaggtttagaatcacaaattacactcctgtttatgatttgaaaacttcaaagtttggtttttccatctgtacatacacagaacagtgttatcgtgctgaaacatttgtatcttaagatggcagtcacagtttccatctgtctggatatattttggacttttgcatgttaaacataagaaagagactttttgttttaggtaatctaagactgttgtacacaaactacagattactgtagggttcagcaaactatgtttataatgtgacattaatatctattttgatgtctaaatcaaaactttttttagaaataattttttttttacaaatatctccacaaattcaggtttattttataaaatggcaggatagtaaagaaataggtggtttgccatagtatatgaatacatgcacttaattaaaataccaaatattataatcaaaatttagatagcagatttaaataatttcttgatttttcactacaggatagaaattcacaaatattttataaatcaaagctattagtattaggttttacttagtagtaatatatatatatattctgggtatttaaaaaatatatatatattctgggtatttgaaaacaccaaattattgatgaaaatgtccattttgaacaaattattgatcatatatatcatacatcatacatacatatcatatatgcaatcatacattatcatatatgtatgatgtataatatatgatcaagaatttgttcaaaatgggtatttttcatcaataatttggtgttttcaaatacccagaagtcttgttttaatcagattaactctaagaatagtttactaattttattttttatggtgtgttcaaaatttgatagtttaatatggattgatgatgggtaaactaatcaatttcttttcaaatctcataggcctattacattgtcaaggatgttattaataaaaattctttcttttaatattgtttacagggatttaggtctagtctaatctgctcaacctgttaatcagtgtcagctgccagattccaactcatttttagtgtgcctatgtgactttttctccatagtctctgaattacattttgattagttattggaatatcatatagcacagctcatacatttaaaacaaaaccaccaggtaaaatgagttctggtttagtataaagaagctgtcaccaagttagtgttacatacatagatggatgtggctcaacaagattttagacaaaaaaatttgaattgaactatggcaacgtgtgttgctatgacttagcctctagtgggcttatgaacaaagacaaatttcagcaaatttatccagttgctttcagtatctctaaagatagtatgtcaagaattctcatgctactgtctgaaaaaacagattcttctcttatctaagaaatcaactggatatatttttataagcttgtgcaagaaaaaactgcaatgcagtactaataattacagacgatataatgtggaaaagaataatctagaatgtcaatttcaatatgtaagtatttaggttgggcatggggactcatgcctgtaatcccagcacttgggaggctgagtcatgtggatcactttaggtctggagttcaaggccagcctggccaacatggtaaaacccatcactactaaaaatacaaaaatcaagcatggtgggaagcacctgtaatcccagctactcaggaggctgaggcaagagaatagcttgaactcaggagacagagattgcagtgaactgagattgaagcaccgcattctagcctgagttacagagtgagattctgcctcaaaaaaaaaaaaaaaaaaaaagtatttaacctttcacttgaaaaatgtgataaaattaagtttttggtaagctttgtgtagcttaacatcagcatagagtagaaaaaaaatctttaaaaatgcaaacaaaaagctacaccaaaaaaactaacatctaccagtgcatacatattgatctttgttttgggagagtctaaagcaaaacatttggtgaacttgatacagttattttgatcacattggcatactgataaaatcattttatttaatttcactgaaacatgttcacatcttaaaaatactgttttgtaacatgaatgataaatgtaaagtctttatcctcaagaggatcctgattctcaagatatatggcaacccgtgtctctggtttctccaaactgaagtttcatgaaggctcaaacatgaagtgagagggagtcaacaacagagcatgagaagcaagaaggatgaggtaggatggtcagctctaaggctcagaggttcctgggggaccccaatataatgatgtcaactatgaagctcactagtaaacataaacataaaaagctgaggctgggcatggtggctcatgcctgtaatcccagcactttgggaggcctaggcaagcggatcacaaggtcaagagatcaagaccatcctggccaacgtggtgaaaccccgtctctactaaaaatacaaaaattagctgggcatggtggcgcacacctctaatcccagctactcaggaggctgaggcacgagaatggcttgaacccgggaggtgaaggttgcagtgagccgagatcacaccactgcattccagcctggtgacagagtgagactccatctcaaaaaaaaaaaaaaaaaaaaaagttgaaaactccatggcttctctttggtgagaaaaagtctctggaattacaaacagtcctgccaaaaggattgagccagaatgacatgtatctaaggattattaaggaggaatgttcataagcacataagtatttgttccaaaacttattacagtagcaatatccttttctgtaattttagcttccccaaggtagggttgctgtagacaaactaagacaaggcactaatatgttgaaggcaattagtttctaaatttaaaaaacttgcaatttttttttttgagatagagtctcgctctgtcacccaggctggagtgtggtggcacaatctcggctcactgcaacctctgtatcccaggttcaagcaagtctcctgcctcagccctccaaatacctgggattacaggtgcctgccaccatgcccagctattttttgcatttttagtagcgacagagtttcaccacgttggccaggccggtctcgaactcctgacctcaggtgatccacccacctcgggctcccaaagggctgggattaccggggtgagccaccacacctggcccaaaaacttgcaataattttataaattttattgaactctgtttcatgtataaatctcacaaaaagacactatccagtagctatttccctgagacttttctgggaatttctgttgcttgatttcaaatcaaccttattagaatcctagtcatttttgaagccctagatgtaataaaagaaagagggcaggaatgaaaccaagtttccccaaacagtcaatgtctaatatattttgttccccaaaatgaccccaaaaaccacacaagctaaaaaacagtgggtttgaaatttaacctacattcaacagtagcagaaaaccatatgtaaaaatcagcaaagtcataacttagaaacattctgttattccagaaaaaataataaaattcttattttggcatttttaaaaaagaaaaaatacactaaatatgacaaaatataccaactcacttatatctttgaaatatgattttctttctcctaagtatttaatataatatttagacaagactttcatgtattatagctaccatgcatgaactaaaatagccttgggggaaataatttttattaataatgaatattgaggctccagaaatgtaaaatgatttatcttggatacacagctagtgacccaaatgaagctcaaatatgtttgatttaaaaattttaattttgccactgttgacaatgttgacataacagctaaatctgagccttagagttgatagttggggaataaatcaagtactattgaggcgggctaggtaatcaagaaagtggctatgtcctggggatgcggcaaccatggtgattgcatgacaactgcagactgccaacacaataagcaccaacatttacattggatttcagctcattcaagaaaagctctctccagcagggaaattcccctgtagagagcacagtttgattttacctgtcctctaactgaccttttactcattgtaatagtaaaaaacactcacgtgtgtggagatttaagatgctaatgagatatgtgacatataaagaaacatgtacaggtactgagtgtgtgtacgaagagaaccacccagaacatggttactagtaacatctctttccacctccttataaataattatgtaagactctcataaatggaatctccttagttccagcctttgctgtatcattctttttttttttttttttttaatttgagatggagtttcgatcttgttgcccaggctggagtgcaatggtgcaatcttggctcaccacaacctccgccacctggattcaagcgattctcctgcctcagcctcccgagtagctgggattacaggtgcctgccacaacaccagctaattttttgtatttttagtagagacagtgttttactacgttggccaggctggtctcaaactcctgacctcaggtgatcttcccacctcagcctcccaaagtgctgggattacaggcgtgagccactgtgcccagcctgaagtattttaaaatggaggttgagagccttgagattaaaggtcagatttgatggtcactccatactcaccactccgatgattctgtattttgttctgatcctggacaagctcccagatgaaatggctgcactgtctggggtaaatacctggggtccattgtctaatgccaggaaaatgtatgacataaacacacaggaggagtgggtttaggagcagaaagtttaatagacaaaaaagaagagagaaagcttcctcatgctgagaaagcaggtcacccagaagagtttctgggtttggggtagaacacgattgattttgtagagaggcttgtggaggcagtgattgatttacatagggcccaggggtttggttgaccaggagtgccatttacatagccagtgaaaacactggctccccaccctagccttttattatgcaaatgcagcttctacctggctgtgaccatgacacctacacacagggtgaaaaggaaaagagggggaagtttccatgttgaaatataactggcttttggtacagctgcctctatttacatatgcaaccctctagcttgcttataagcttgcagtttgactttttaggctactttctgttaggaataaaatggtttgggggctgctttttattaaaggaaaattccagtgagaactcttttacccacttaaactgcctaaaacagtttcttaataaatcctgtattaactcctcttcaacttcatttctattgtggcatgaataattttggactgctttagcatcttcctttaacttctgctaattttctttgactttttattattcttgtccatctctggtggttgctttgctgtaccagtttgagaagttcaggtggtttcaccctcagctgctccagcagtccattcatttggctcaagctcttggacagtttctccccgttcttctgtttgtggcatctgagatttgtcagcagggcgtggttttcaggaaccatggctaccacctcgttccacctgcagggtggctcttgcacttctggtgggtgctgattctacagaaacaacagcagcagccagagcatccacatctggtgtcacccagctcagggacaccctggctgtaaccctgggatgaggtccagctaactgcatagaaatctaaggtcatccagagcatttcccatagctgggtgaaccctcctcagtttgtggagccaggccctcccaccagcttcctgctgcctcctcctctaccatcagagggatgcacaggatgaggaaggagcacggagtcaccatggaagagtccaggggagtgaggatgagctgggacaggcagcctcaggccaagtgcatggtggtgcccctcatacctgagcacaaatcagatcagccactgccactgcagggaggacagagaagcccaggcttcccagccagcctccctctgcaccagtagagatgaaaactattttttttttttttttttttttttttttttttttttttttgagacggagtctcgctctgtcgcccaggctggagtgcagtggcgggatctcggctcactgcaagctccgcctcccgggttcacgccattctcctgcctcagcctcccaagtagctgggactacaggcgcccgccactacgcccggctaattttttgtatttttagtagagacggggtttcaccggaaaactatttcttaaacaaaagtatggagtagaacttgcatatctgacccaatcacattttcattctctttttctttttgttttgctttttcctcttagattgtgctctcctgaagtcagattgggataggaggtttataggaaacttcagaagtatccacttatcaggagtgtgtaaggcgtttatgtagttagacttcaagtttcatgagagtagagaccaaaactttcctttctctattttattttctaaggctaccaaaaggatggcatatcatgtgtgctccacatacatttattggttaaaagaatgaatacatattctttgtaaactgtgaaactatgcaaatcaagcctttattatttttattttctatagtttagttaataaaatcaaatagaaaataatgaagtgtagaatgcagaaagcactatcgaaagtttaatgttgctctccctattcctattcctatccctatccctatccctatccctatccctatccctatccctatccctctccacggtctccctctgatgccgagccgaagctggactgtactgctgccatttctgctcactgcaacctccctgcctgattctcctgcctcaacctgccgagtgcctgcgattgcaggcgtgcgctgccacgcctgactggttttcatatttttttggtggagacggggtttcgctgtgttgtccgggctggtctccagctcctaactgggagtgatctgccagcctcggcctcccgaggtgccgggattgcagtcggagtctcattcactcagtgctcaatggtgcccaggctggagtgcagtggcgtgatctcggctcgctacaacctccacctcccagccgcctgccttggcctcccaaagtgccgagattgcagcctctgcccagccgccaccccatctgggaagtgaggagcgtctctgcctggccgcccatcgtctgggatgtgaggagcccctctgcccagctgcccagtctgggaagtgaggagcgcctcttcccggccgccatcccgtctaggaagtgaggagcgtctctgcccggccgccccgtctgagaagtgaggagcccctccgcccggcagccgccccgtctgggaagtgaggagcgtctccgcctggcagccgccccgtccgggaggtggggggtcagcccctgccctgccagccgccccgtccgggagggaggttgggggggccagcccctggccggccagccgccccgtccgggaggtgggggggcgcctctgcctggccgccccttctgggaagtgaggtgcccctctgcccggccgccaccccatctgggaggtgtacccaacagctcattgagaacgggccatgatgacgatggcggttttgtcgaatagaaaagggggaaatgtggggaaaagattgagaaatcagattgttgctgtgtctgtgtggaaagaagtagacataggagactccattttgttctgtactaagaaaaattcttctgccttgggatcctgttgatctatgaccttacccccaaccctgtgctctctgaaacatgtgctgtgtccactcagggttaaatggattaagggcggtgcaagatgtgctttgttaaacagatgcttgaaggcagcatgctcgttaagagtcatcaccactccctaatctcaagtacccagggacacaaacactgcggaaggccccagggccctctgcctaggaaaaccagagacctttgttcacatgtttatctgctgaccttccctccactattgtcctatgaccctgccaaatcctcctctctgagaaacacccaagaatgatcaataaaaaaactaaataaataaaaatttaaaaaaaaagaaagtttaatgttaacccagcacacatgggtaaaatacattttttttttttttcagacggagtttcactcttgttgccttggctggagtgcaatggtgcgatgtgggctcaccgcaacctcacctcccgggttcaagcgatttttcctgcctcagcctcctgagtagctgggattacaggcatgcgccaccatgcccagctaattttgtagttttagtagaaacggtgttgccccatgttggtcaggctggtctcgaactcctgacctcaggtgatccacctgcctcggcctcccaaagtgctgggattataggcgtgagccacctggcccggccattaaaatttttagtttctaaatttgggaccattataattacatttaaattgccacatgaggatggaacatgaaacctgacttcaggagagcacaatttaaggggaaatggcaaaaaaaaaaaaaaaaaaagaaagaaaaagaaaaatgaaaatttgattcggtcagatccgcaagttctcctccatactttttgtttttttagaaaataattctttcctctgctggtgcagagtgaggctagctgggggagcctgggccccactgtcctcccggaggtggcagtggccgatttctgctcaggcatgaggggcgccgccatgtcctgggcctgaggctgcccagcccagcccctcctcactcctttggactcttccacggtgtctccaggcccctgcaccatcctgtgtaactctctgatgaaaggcgaggtggcagcatgaagatgatgggggaactgccccgcatgccaaggaaagctcgcccagctgcacaaaatgctctggttgacatcgggtttctgcgcaccaagctgcgccatgaccaagggttagagccgaggcgtccaccggctgggccaccccggacgtgggcgctccatctgctcctgcggttcctgctgtgcttggctaagccgtggctggaaccggcgcccgccagaagtgcaggagccgccctgccggcagaaagagggcatggtcgctgaaaaccaggccctgctgacaaatctcagacgccaggaacagaagaaccacaaaaatggacggaccgttggaacacctgagggtgaagttgtgcgaactcctcaaagtggaacagcaaagcagccaccagagatggactagaaagatgaaaaattagcagaaatcaaaggcagatgctaaagcagtgcaaaaccgttcacacaacgatagagacggaattgatgaagaagtttgagaaatgaatgacagaaagaaaggacagcagtgaccatggtaaggtgctgacgattctggtccactggatcccatcatccctagggcagtaaatctcatcacagtcaccactcagcaagttaccaccgcagcatttcctgtttgttccaaaatgaataaaagtgattctcatcacaagggcaaatacagagtagtttattattattatttttaactaaactgtagcggtttagttt
